United States Patent Application Publication US 2006/0003322 A1 - sequence listing, part 32

SEQ ID NO: 1372885 - RNA, 24 nt, Human
ugaucugcccaccucagccuccca

SEQ ID NO: 1372886 - RNA, 22 nt, Human
ugcaguggugugaucucggcuc

SEQ ID NO: 1372887 - RNA, 20 nt, Human
ugccuuagccucccaaguag

SEQ ID NO: 1372888 - RNA, 20 nt, Human
ugccuuagccucccaaguag

SEQ ID NO: 1372889 - RNA, 27 nt, Human
ugcugggauuacaggcauaagccacca

SEQ ID NO: 1372890 - RNA, 24 nt, Human
uggaaaauagaaccuccguugaaa

SEQ ID NO: 1372891 - RNA, 19 nt, Human
uggagccaggaacccaagg

SEQ ID NO: 1372892 - RNA, 19 nt, Human
uggagugcaguggugugau

SEQ ID NO: 1372893 - RNA, 23 nt, Human
uggagugcaguggugugaucucg

SEQ ID NO: 1372894 - RNA, 24 nt, Human
uggagugcaguggugugaucucgg

SEQ ID NO: 1372895 - RNA, 20 nt, Human
uggccucgaacuccugaccu

SEQ ID NO: 1372896 - RNA, 23 nt, Human
uggcuggagugcaguggugugau

SEQ ID NO: 1372897 - RNA, 18 nt, Human
ugggauuacaggcauaag

SEQ ID NO: 1372898 - RNA, 22 nt, Human
ugggauuacaggcauaagccac

SEQ ID NO: 1372899 - RNA, 24 nt, Human
ugggauuacaggcauaagccacca

SEQ ID NO: 1372900 - RNA, 24 nt, Human
ugggauuacaggcauaagccacca

SEQ ID NO: 1372901 - RNA, 20 nt, Human
uguucauacacgcccucccc

SEQ ID NO: 1372902 - RNA, 23 nt, Human
uucaaguguuucucaugccuuag

SEQ ID NO: 1372903 - RNA, 23 nt, Human
uucauggacauuuaucaguuccc

SEQ ID NO: 1372904 - RNA, 27 nt, Human
uucgcucccucccuccuuuccuuccuu

SEQ ID NO: 1372905 - RNA, 18 nt, Human
uucucagccggccaacac

SEQ ID NO: 1372906 - RNA, 19 nt, Human
uugagacagagucucgcuc

SEQ ID NO: 1372907 - RNA, 19 nt, Human
uugcucaggguugcuuugg

SEQ ID NO: 1372908 - RNA, 21 nt, Human
uuucauggacauuuaucaguu

SEQ ID NO: 1372909 - RNA, 22 nt, Human
uuucgcucccucccuccuuucc

SEQ ID NO: 1372910 - RNA, 26 nt, Human
uuucgcucccucccuccuuuccuucc

SEQ ID NO: 1372911 - RNA, 22 nt, Human
uuuuaugguucuguauauauuu

SEQ ID NO: 1372912 - RNA, 20 nt, Human
uuuuuuuuuuugagacagag

SEQ ID NO: 1372913 - RNA, 25 nt, Human
uuuuuuuuuuuugagacagagucuc

SEQ ID NO: 1372914 - RNA, 21 nt, Human
aaaugagugccuucccaccug

SEQ ID NO: 1372915 - RNA, 20 nt, Human
aaggugccagggaaccagua

SEQ ID NO: 1372916 - RNA, 24 nt, Human
acuguucaucuccucuuucuuucc

SEQ ID NO: 1372917 - RNA, 25 nt, Human
agaauucugacaucacucacagucc

SEQ ID NO: 1372918 - RNA, 24 nt, Human
aggcaccuuccaguucucccucac

SEQ ID NO: 1372919 - RNA, 23 nt, Human
aucacacaccaguuuccuugauc

SEQ ID NO: 1372920 - RNA, 22 nt, Human
cacaguccugcaggcaccuucc

SEQ ID NO: 1372921 - RNA, 18 nt, Human
caccagaacaccgcagcg

SEQ ID NO: 1372922 - RNA, 21 nt, Human
cagaagaugccgagucucgac

SEQ ID NO: 1372923 - RNA, 24 nt, Human
cagcaaacuccgacgaggcaacau

SEQ ID NO: 1372924 - RNA, 23 nt, Human
ccucuaagauacuuggacuucug

SEQ ID NO: 1372925 - RNA, 21 nt, Human
cgcagcggauacuugcacgcc

SEQ ID NO: 1372926 - RNA, 23 nt, Human
cucacggaacacaugguaguaac

SEQ ID NO: 1372927 - RNA, 19 nt, Human
cucgacugcccaugucacg

SEQ ID NO: 1372928 - RNA, 24 nt, Human
cucuacaguuacaagguguuugcc

SEQ ID NO: 1372929 - RNA, 18 nt, Human
cuugagaauaaaaagaag

SEQ ID NO: 1372930 - RNA, 18 nt, Human
gaagaaucacacaccagu

SEQ ID NO: 1372931 - RNA, 22 nt, Human
gagaauaaaaagaaguccuguu

SEQ ID NO: 1372932 - RNA, 19 nt, Human
gaugaaacacaggacuugg

SEQ ID NO: 1372933 - RNA, 23 nt, Human
gccagccucuccacucuagcacc

SEQ ID NO: 1372934 - RNA, 20 nt, Human
gguaaauaaucaggccuuuu

SEQ ID NO: 1372935 - RNA, 20 nt, Human
uagcaccagaacaccgcagc

SEQ ID NO: 1372936 - RNA, 21 nt, Human
ucaggccggauucucaccaug

SEQ ID NO: 1372937 - RNA, 24 nt, Human
uccaacaucacuggugauaauucc

SEQ ID NO: 1372938 - RNA, 23 nt, Human
uccacaagugaccucugcacuga

SEQ ID NO: 1372939 - RNA, 24 nt, Human
uccacucuagcaccagaacaccgc

SEQ ID NO: 1372940 - RNA, 21 nt, Human
ucuccugucaucaccagcaaa

SEQ ID NO: 1372941 - RNA, 29 nt, Human
ucuccugucaucaccagcaaacuccgacu

SEQ ID NO: 1372942 - RNA, 21 nt, Human
ucuuucuuuccuuggcuauuu

SEQ ID NO: 1372943 - RNA, 21 nt, Human
ugagaauaaaaagaaguccug

SEQ ID NO: 1372944 - RNA, 23 nt, Human
ugagugccuucccaccuggucuc

SEQ ID NO: 1372945 - RNA, 23 nt, Human
ugaucguaguagcuuugcagaau

SEQ ID NO: 1372946 - RNA, 19 nt, Human
ugcaggcaccuuccaguuc

SEQ ID NO: 1372947 - RNA, 24 nt, Human
ugccacucuacgcucuacaguuac

SEQ ID NO: 1372948 - RNA, 24 nt, Human
uggcuauuucuguuuccucuaaga

SEQ ID NO: 1372949 - RNA, 22 nt, Human
uggguccugggauccuauggga

SEQ ID NO: 1372950 - RNA, 19 nt, Human
uuuuuuuuuuuuuuuuuaa

SEQ ID NO: 1372951 - RNA, 22 nt, Human
ccagucugccggcccggccccu

SEQ ID NO: 1372952 - RNA, 22 nt, Human
ugcgucgcccaccagcaccagc

SEQ ID NO: 1372953 - RNA, 21 nt, Human
aaauaaguggaaucaauaaua

SEQ ID NO: 1372954 - RNA, 24 nt, Human
accccugguucucacucaggcggu

SEQ ID NO: 1372955 - RNA, 21 nt, Human
agaccccugguucucacucag

SEQ ID NO: 1372956 - RNA, 18 nt, Human
aguggaaucaauaauacc

SEQ ID NO: 1372957 - RNA, 20 nt, Human
aguggaaucaauaauaccaa

SEQ ID NO: 1372958 - RNA, 25 nt, Human
caugccccagacucuccuuggaggu

SEQ ID NO: 1372959 - RNA, 21 nt, Human
ccaugccccagacucuccuug

SEQ ID NO: 1372960 - RNA, 20 nt, Human
ccccaugccccagacucucc

SEQ ID NO: 1372961 - RNA, 24 nt, Human
cccccaugccccagacucuccuug

SEQ ID NO: 1372962 - RNA, 21 nt, Human
cuggcagccccccaugcccca

SEQ ID NO: 1372963 - RNA, 21 nt, Human
gccccagacucuccuuggagg

SEQ ID NO: 1372964 - RNA, 21 nt, Human
gcuggugcaggcuugacaagg

SEQ ID NO: 1372965 - RNA, 20 nt, Human
gggcaagagcggggaaugag

SEQ ID NO: 1372966 - RNA, 26 nt, Human
uaauaccaaaaagccaaauuauuuaa

SEQ ID NO: 1372967 - RNA, 21 nt, Human
uaccaaaaagccaaauuauuu

SEQ ID NO: 1372968 - RNA, 22 nt, Human
ucuucacuucaccacuggccuc

SEQ ID NO: 1372969 - RNA, 20 nt, Human
ucuugcccaacccuggcagg

SEQ ID NO: 1372970 - RNA, 22 nt, Human
ugacaagggcaagagcggggaa

SEQ ID NO: 1372971 - RNA, 23 nt, Human
ugacaagggcaagagcggggaau

SEQ ID NO: 1372972 - RNA, 21 nt, Human
uggaaucaauaauaccaaaaa

SEQ ID NO: 1372973 - RNA, 20 nt, Human
uggacccauuggagcagcag

SEQ ID NO: 1372974 - RNA, 19 nt, Human
uggagcagcagaguugaag

SEQ ID NO: 1372975 - RNA, 18 nt, Human
uuuacaaaauaaguggaa

SEQ ID NO: 1372976 - RNA, 22 nt, Human
uuuuacaaaauaaguggaauca

SEQ ID NO: 1372977 - RNA, 24 nt, Human
aaacagccucugcagauucagggc

SEQ ID NO: 1372978 - RNA, 22 nt, Human
aaagcugaugaagaaaccacaa

SEQ ID NO: 1372979 - RNA, 23 nt, Human
aacuucacuccucugagccucug

SEQ ID NO: 1372980 - RNA, 21 nt, Human
aagcacccggugccugggaug

SEQ ID NO: 1372981 - RNA, 20 nt, Human
acccggugccugggaugcug

SEQ ID NO: 1372982 - RNA, 20 nt, Human
accuggacacaaaacuuaag

SEQ ID NO: 1372983 - RNA, 24 nt, Human
accuguggaagccagagcuggccc

SEQ ID NO: 1372984 - RNA, 18 nt, Human
acugcagccuccgccucc

SEQ ID NO: 1372985 - RNA, 23 nt, Human
acugcagccuccgccuccugguu

SEQ ID NO: 1372986 - RNA, 23 nt, Human
aggcaggagggagagugcagcuc

SEQ ID NO: 1372987 - RNA, 25 nt, Human
aggcuggagugcaguggcacaaucu

SEQ ID NO: 1372988 - RNA, 23 nt, Human
aggcuugaaaacugaauuuaacc

SEQ ID NO: 1372989 - RNA, 21 nt, Human
agggcuggaggcugaggggcc

SEQ ID NO: 1372990 - RNA, 23 nt, Human
aguagcugggauuacaggcacau

SEQ ID NO: 1372991 - RNA, 21 nt, Human
agugcaguggcacaaucucag

SEQ ID NO: 1372992 - RNA, 24 nt, Human
agugcaguggcacaaucucagcuc

SEQ ID NO: 1372993 - RNA, 23 nt, Human
auccuuuuuccuccugccuucuc

SEQ ID NO: 1372994 - RNA, 22 nt, Human
caaacacagaacccugucuccc

SEQ ID NO: 1372995 - RNA, 22 nt, Human
caacuucccagauucaaauccu

SEQ ID NO: 1372996 - RNA, 18 nt, Human
cacaggagaccaagaugg

SEQ ID NO: 1372997 - RNA, 21 nt, Human
caccgcagcaaacacagaacc

SEQ ID NO: 1372998 - RNA, 24 nt, Human
cagagcuggcccaggccacaccau

SEQ ID NO: 1372999 - RNA, 20 nt, Human
cagccuccugaguagcuggg

SEQ ID NO: 1373000 - RNA, 22 nt, Human
cagccuuugcuccuuaaucaga

SEQ ID NO: 1373001 - RNA, 22 nt, Human
caggaaggcaacuucacuccuc

SEQ ID NO: 1373002 - RNA, 21 nt, Human
cauuuauguuagggcuggagg

SEQ ID NO: 1373003 - RNA, 20 nt, Human
ccagaagcacccggugccug

SEQ ID NO: 1373004 - RNA, 19 nt, Human
ccgcagcaaacacagaacc

SEQ ID NO: 1373005 - RNA, 23 nt, Human
ccgcagcaaacacagaacccugu

SEQ ID NO: 1373006 - RNA, 25 nt, Human
ccgccuccugguucaagcaauucuu

SEQ ID NO: 1373007 - RNA, 22 nt, Human
ccuagcucaucacuuucaugcu

SEQ ID NO: 1373008 - RNA, 18 nt, Human
ccuccugccuucuccucc

SEQ ID NO: 1373009 - RNA, 23 nt, Human
ccuccugccuucuccucccuuca

SEQ ID NO: 1373010 - RNA, 23 nt, Human
ccuccugguucaagcaauucucc

SEQ ID NO: 1373011 - RNA, 24 nt, Human
ccuccuguaucuuuacagggguug

SEQ ID NO: 1373012 - RNA, 23 nt, Human
ccugaguagcugggauuacaggc

SEQ ID NO: 1373013 - RNA, 24 nt, Human
ccugaguagcugggauuacaggca

SEQ ID NO: 1373014 - RNA, 19 nt, Human
ccugguucaagcaauucuc

SEQ ID NO: 1373015 - RNA, 22 nt, Human
ccugguucaagcaauucuccug

SEQ ID NO: 1373016 - RNA, 23 nt, Human
cggcugaggcaggagggagagug

SEQ ID NO: 1373017 - RNA, 24 nt, Human
cguucuguugcccaggcuggagug

SEQ ID NO: 1373018 - RNA, 18 nt, Human
cuagagcccaacuuccca

SEQ ID NO: 1373019 - RNA, 24 nt, Human
cucacugcagccuccgccuccugg

SEQ ID NO: 1373020 - RNA, 18 nt, Human
cuccaaugcccuggaccu

SEQ ID NO: 1373021 - RNA, 27 nt, Human
cuccauagggaaaacugcagccaacuu

SEQ ID NO: 1373022 - RNA, 24 nt, Human
cucguucuguugcccaggcuggag

SEQ ID NO: 1373023 - RNA, 24 nt, Human
cugaauuuaaccgacauuuauguu

SEQ ID NO: 1373024 - RNA, 23 nt, Human
cugagccucugguuccucaucug

SEQ ID NO: 1373025 - RNA, 23 nt, Human
cugaguagcugggauuacaggca

SEQ ID NO: 1373026 - RNA, 23 nt, Human
cugugucagccuccugaguagcu

SEQ ID NO: 1373027 - RNA, 19 nt, Human
cuguugcccaggcuggagu

SEQ ID NO: 1373028 - RNA, 19 nt, Human
gaaaacugcagccagaagc

SEQ ID NO: 1373029 - RNA, 21 nt, Human
gaagaaaccacaggagaccaa

SEQ ID NO: 1373030 - RNA, 25 nt, Human
gaguagcugggauuacaggcacaug

SEQ ID NO: 1373031 - RNA, 21 nt, Human
gcaaacacagaacccugucuc

SEQ ID NO: 1373032 - RNA, 25 nt, Human
gcaguacaguguggcagaagggccc

SEQ ID NO: 1373033 - RNA, 19 nt, Human
gcccaggcuggagugcagu

SEQ ID NO: 1373034 - RNA, 20 nt, Human
gcccaggcuggagugcagug

SEQ ID NO: 1373035 - RNA, 19 nt, Human
gcuggagugcaguggcaca

SEQ ID NO: 1373036 - RNA, 24 nt, Human
ggaaaacugcagccagaagcaccc

SEQ ID NO: 1373037 - RNA, 20 nt, Human
ggccuuguguaaaugugccc

SEQ ID NO: 1373038 - RNA, 23 nt, Human
ggcucugggcuucucgccuuggg

SEQ ID NO: 1373039 - RNA, 23 nt, Human
ggcucugggcuucucgggagagc

SEQ ID NO: 1373040 - RNA, 23 nt, Human
ggcuggaggcugaggggccucca

SEQ ID NO: 1373041 - RNA, 21 nt, Human
gggcaucuugagaaacagccu

SEQ ID NO: 1373042 - RNA, 24 nt, Human
guaaaaaaaaagcugaugaagaaa

SEQ ID NO: 1373043 - RNA, 18 nt, Human
guagcugggauuacaggc

SEQ ID NO: 1373044 - RNA, 18 nt, Human
gucgaggccuccaaugcc

SEQ ID NO: 1373045 - RNA, 18 nt, Human
guggggcagagugacucc

SEQ ID NO: 1373046 - RNA, 20 nt, Human
gugucagccuccugaguagc

SEQ ID NO: 1373047 - RNA, 22 nt, Human
gugucagccuccugaguagcug

SEQ ID NO: 1373048 - RNA, 19 nt, Human
uaagacggaccccggcuga

SEQ ID NO: 1373049 - RNA, 22 nt, Human
uagggaaaacugcagccagaag

SEQ ID NO: 1373050 - RNA, 19 nt, Human
ucacugcagccuccgccuc

SEQ ID NO: 1373051 - RNA, 23 nt, Human
ucacugcagccuccgccuccugg

SEQ ID NO: 1373052 - RNA, 24 nt, Human
ucacugcagccuccgccuccuggu

SEQ ID NO: 1373053 - RNA, 27 nt, Human
ucacugcagccuccgccuccugguuca

SEQ ID NO: 1373054 - RNA, 20 nt, Human
ucagccuccugaguagcugg

SEQ ID NO: 1373055 - RNA, 19 nt, Human
ucaucacuuucaugcugug

SEQ ID NO: 1373056 - RNA, 22 nt, Human
uccauagggaaaacugcagcca

SEQ ID NO: 1373057 - RNA, 23 nt, Human
uccgccuccugguucaagcaauu

SEQ ID NO: 1373058 - RNA, 19 nt, Human
uccuccugccuucuccucc

SEQ ID NO: 1373059 - RNA, 24 nt, Human
uccugaguagcugggauuacaggc

SEQ ID NO: 1373060 - RNA, 20 nt, Human
uccugccuucuccucccuuc

SEQ ID NO: 1373061 - RNA, 23 nt, Human
uccugguucaagcaauucuccug

SEQ ID NO: 1373062 - RNA, 22 nt, Human
ucuccaugggccauuuggaggc

SEQ ID NO: 1373063 - RNA, 23 nt, Human
ucuccucccuucaccgcagcaaa

SEQ ID NO: 1373064 - RNA, 23 nt, Human
ucucguucuguugcccaggcugg

SEQ ID NO: 1373065 - RNA, 24 nt, Human
ucucguucuguugcccaggcugga

SEQ ID NO: 1373066 - RNA, 18 nt, Human
ucuguugcccaggcugga

SEQ ID NO: 1373067 - RNA, 24 nt, Human
ucuguugcccaggcuggagugcag

SEQ ID NO: 1373068 - RNA, 24 nt, Human
ugaagaaaccacaggagaccaaga

SEQ ID NO: 1373069 - RNA, 24 nt, Human
ugaccucaggaaggcaacuucacu

SEQ ID NO: 1373070 - RNA, 18 nt, Human
ugagacagagucucguuc

SEQ ID NO: 1373071 - RNA, 22 nt, Human
ugagacagagucucguucuguu

SEQ ID NO: 1373072 - RNA, 23 nt, Human
ugcagccagaagcacccggugcc

SEQ ID NO: 1373073 - RNA, 18 nt, Human
ugcccaggcuggagugca

SEQ ID NO: 1373074 - RNA, 21 nt, Human
ugcccaggcuggagugcagug

SEQ ID NO: 1373075 - RNA, 22 nt, Human
ugcccaggcuggagugcagugg

SEQ ID NO: 1373076 - RNA, 24 nt, Human
ugcccaggcuggagugcaguggca

SEQ ID NO: 1373077 - RNA, 22 nt, Human
ugcccuggaccaucuacugcuc

SEQ ID NO: 1373078 - RNA, 23 nt, Human
ugcccuggaccaucuacugcucu

SEQ ID NO: 1373079 - RNA, 22 nt, Human
ugcccuggaggugccacccagu

SEQ ID NO: 1373080 - RNA, 19 nt, Human
ugccugggaugcuggaguc

SEQ ID NO: 1373081 - RNA, 27 nt, Human
ugcuaagacggaccccggcugaggcag

SEQ ID NO: 1373082 - RNA, 22 nt, Human
ugcuggagacagagccauucac

SEQ ID NO: 1373083 - RNA, 21 nt, Human
uggaagccagagcuggcccag

SEQ ID NO: 1373084 - RNA, 18 nt, Human
uggacacaaaacuuaagc

SEQ ID NO: 1373085 - RNA, 18 nt, Human
uggaggcugaggggccuc

SEQ ID NO: 1373086 - RNA, 18 nt, Human
uggagugcaguggcacaa

SEQ ID NO: 1373087 - RNA, 23 nt, Human
uggagugcaguggcacaaucuca

SEQ ID NO: 1373088 - RNA, 24 nt, Human
uggagugcaguggcacaaucucag

SEQ ID NO: 1373089 - RNA, 23 nt, Human
uggcacaaucucagcucacugca

SEQ ID NO: 1373090 - RNA, 25 nt, Human
uggcagaaggcaguacagucuggcu

SEQ ID NO: 1373091 - RNA, 23 nt, Human
uggccagaaauccagccuuugcu

SEQ ID NO: 1373092 - RNA, 23 nt, Human
uggcccaggccacaccaugacgg

SEQ ID NO: 1373093 - RNA, 19 nt, Human
uggcucugggcuucucgcc

SEQ ID NO: 1373094 - RNA, 21 nt, Human
ugggauuacaggcacaugcca

SEQ ID NO: 1373095 - RNA, 22 nt, Human
ugggauuacaggcacaugccac

SEQ ID NO: 1373096 - RNA, 23 nt, Human
ugggauuacaggcacaugccaca

SEQ ID NO: 1373097 - RNA, 18 nt, Human
ugggguuugauggagaga

SEQ ID NO: 1373098 - RNA, 25 nt, Human
ugugcacuggggcgaugaugcugug

SEQ ID NO: 1373099 - RNA, 19 nt, Human
uguggccagaaauccagcc

SEQ ID NO: 1373100 - RNA, 20 nt, Human
uguggccagaaauccagccc

SEQ ID NO: 1373101 - RNA, 21 nt, Human
uuacaggggucaggcccuccu

SEQ ID NO: 1373102 - RNA, 24 nt, Human
uuccaaacugcuaagacggacccc

SEQ ID NO: 1373103 - RNA, 18 nt, Human
uuugcuccuuaaucagac

SEQ ID NO: 1373104 - RNA, 23 nt, Human
uuuucuuuuuuuuuuuuuuuggg

SEQ ID NO: 1373105 - RNA, 20 nt, Human
uuuuuuuuuuugagacagag

SEQ ID NO: 1373106 - RNA, 25 nt, Human
uuuuuuuuuuuugagacagagucuc

SEQ ID NO: 1373107 - RNA, 22 nt, Human
aaaaaccaccaacaacaccccc

SEQ ID NO: 1373108 - RNA, 24 nt, Human
aaacagccucugcagauucagggc

SEQ ID NO: 1373109 - RNA, 22 nt, Human
aaagcugaugaagaaaccacaa

SEQ ID NO: 1373110 - RNA, 19 nt, Human
aacaacacccccagaaacc

SEQ ID NO: 1373111 - RNA, 21 nt, Human
aacacccccagaaaccccacc

SEQ ID NO: 1373112 - RNA, 22 nt, Human
aaccagaauugggucaggaaca

SEQ ID NO: 1373113 - RNA, 24 nt, Human
aaccagcuuuuuaaguuucuccac

SEQ ID NO: 1373114 - RNA, 23 nt, Human
aacuucacuccucugagccucug

SEQ ID NO: 1373115 - RNA, 20 nt, Human
aagaagagaaaguccgacca

SEQ ID NO: 1373116 - RNA, 18 nt, Human
aagcuuccuugcuugcca

SEQ ID NO: 1373117 - RNA, 18 nt, Human
aaguuucuccacuacaga

SEQ ID NO: 1373118 - RNA, 26 nt, Human
aaucuuguucaucuuuaaaauuccac

SEQ ID NO: 1373119 - RNA, 20 nt, Human
aauugggucaggaacacuga

SEQ ID NO: 1373120 - RNA, 22 nt, Human
acaccacgcccaccaccacgau

SEQ ID NO: 1373121 - RNA, 20 nt, Human
acaggcaaaucaccccccuu

SEQ ID NO: 1373122 - RNA, 26 nt, Human
accaccaacaacacccccagaaaccc

SEQ ID NO: 1373123 - RNA, 22 nt, Human
accaggagauaaaaaccaccaa

SEQ ID NO: 1373124 - RNA, 18 nt, Human
accccccuuucugaccca

SEQ ID NO: 1373125 - RNA, 20 nt, Human
acccggugccugggaugcug

SEQ ID NO: 1373126 - RNA, 24 nt, Human
accuguggaagccagagcuggccc

SEQ ID NO: 1373127 - RNA, 18 nt, Human
acugcagccuccgccucc

SEQ ID NO: 1373128 - RNA, 21 nt, Human
agacaggugguccaugucccu

SEQ ID NO: 1373129 - RNA, 23 nt, Human
agagugaggacacaucuuucugu

SEQ ID NO: 1373130 - RNA, 18 nt, Human
agcuucucagcaaccucc

SEQ ID NO: 1373131 - RNA, 19 nt, Human
agcuucucagcaaccuccu

SEQ ID NO: 1373132 - RNA, 23 nt, Human
aggagaaagccucucugggccua

SEQ ID NO: 1373133 - RNA, 27 nt, Human
aggagauaaaaaccaccaacaacaccc

SEQ ID NO: 1373134 - RNA, 19 nt, Human
aggcaaaucaccccccuuu

SEQ ID NO: 1373135 - RNA, 23 nt, Human
aggcaggagggagagugcagcuc

SEQ ID NO: 1373136 - RNA, 25 nt, Human
aggcuggagugcaguggcacaaucu

SEQ ID NO: 1373137 - RNA, 23 nt, Human
aggcuugaaaacugaauuuaacc

SEQ ID NO: 1373138 - RNA, 21 nt, Human
agggcuggaggcugaggggcc

SEQ ID NO: 1373139 - RNA, 23 nt, Human
aguagcugggauuacaggcacau

SEQ ID NO: 1373140 - RNA, 21 nt, Human
aguccaugaaagcucccccca

SEQ ID NO: 1373141 - RNA, 21 nt, Human
agugcaguggcacaaucucag

SEQ ID NO: 1373142 - RNA, 20 nt, Human
aguguauaaagugaggagaa

SEQ ID NO: 1373143 - RNA, 19 nt, Human
auccacacugaauguaaag

SEQ ID NO: 1373144 - RNA, 23 nt, Human
auccuuuuuccuccugccuucuc

SEQ ID NO: 1373145 - RNA, 24 nt, Human
aucuuguucaucuuuaaaauucca

SEQ ID NO: 1373146 - RNA, 19 nt, Human
augcacuugggucuuggaa

SEQ ID NO: 1373147 - RNA, 24 nt, Human
augucccuucucccucauugucaa

SEQ ID NO: 1373148 - RNA, 22 nt, Human
caaacacagaacccugucuccc

SEQ ID NO: 1373149 - RNA, 18 nt, Human
caaagucaaacuaggaac

SEQ ID NO: 1373150 - RNA, 23 nt, Human
caacaacacccccagaaacccca

SEQ ID NO: 1373151 - RNA, 22 nt, Human
caacuucccagauucaaauccu

SEQ ID NO: 1373152 - RNA, 22 nt, Human
caagggacugaaugugaaacca

SEQ ID NO: 1373153 - RNA, 18 nt, Human
cacagcggcaaguccagc

SEQ ID NO: 1373154 - RNA, 21 nt, Human
cacccccagaaaccccaccua

SEQ ID NO: 1373155 - RNA, 21 nt, Human
caccgcagcaaacacagaacc

SEQ ID NO: 1373156 - RNA, 19 nt, Human
caccuauuaccaguaaccc

SEQ ID NO: 1373157 - RNA, 22 nt, Human
caccuggacacaaaacuuaagc

SEQ ID NO: 1373158 - RNA, 22 nt, Human
cagacaggugguccaugucccu

SEQ ID NO: 1373159 - RNA, 24 nt, Human
cagagcuggcccaggccacaccau

SEQ ID NO: 1373160 - RNA, 20 nt, Human
cagcccagccuccacccugc

SEQ ID NO: 1373161 - RNA, 20 nt, Human
cagccuccugaguagcuggg

SEQ ID NO: 1373162 - RNA, 22 nt, Human
cagccuuugcuccuuaaucaga

SEQ ID NO: 1373163 - RNA, 20 nt, Human
cagcuugaccacaacauggg

SEQ ID NO: 1373164 - RNA, 22 nt, Human
caggaaggcaacuucacuccuc

SEQ ID NO: 1373165 - RNA, 22 nt, Human
ccaacaacacccccagaaaccc

SEQ ID NO: 1373166 - RNA, 19 nt, Human
ccacaggagaccaagaugg

SEQ ID NO: 1373167 - RNA, 25 nt, Human
ccaccagcaagcgaucaucaaauca

SEQ ID NO: 1373168 - RNA, 24 nt, Human
ccacgcccaccaccacgauguucc

SEQ ID NO: 1373169 - RNA, 18 nt, Human
ccacugccuggcacaucu

SEQ ID NO: 1373170 - RNA, 21 nt, Human
ccacugccuggcacaucuagc

SEQ ID NO: 1373171 - RNA, 21 nt, Human
ccagaagcacccggugccugg

SEQ ID NO: 1373172 - RNA, 21 nt, Human
ccagcccagccuccacccugc

SEQ ID NO: 1373173 - RNA, 22 nt, Human
ccagcccagccuccacccugcc

SEQ ID NO: 1373174 - RNA, 24 nt, Human
ccauagggaaaacugcagccaacu

SEQ ID NO: 1373175 - RNA, 19 nt, Human
ccauggugucgcugcagcc

SEQ ID NO: 1373176 - RNA, 22 nt, Human
cccaccuucaagaugccuggac

SEQ ID NO: 1373177 - RNA, 22 nt, Human
cccagcccagccuccacccugc

SEQ ID NO: 1373178 - RNA, 19 nt, Human
cccaggcuggagugcagug

SEQ ID NO: 1373179 - RNA, 25 nt, Human
ccccagaaaccccaccuauuaccag

SEQ ID NO: 1373180 - RNA, 24 nt, Human
ccccagcaccccacgcccuagguu

SEQ ID NO: 1373181 - RNA, 25 nt, Human
ccccagcaccccacgcccuagguuc

SEQ ID NO: 1373182 - RNA, 18 nt, Human
cccccaucaugggcagcu

SEQ ID NO: 1373183 - RNA, 23 nt, Human
ccccuggucaaaacuccugguuc

SEQ ID NO: 1373184 - RNA, 20 nt, Human
cccuggaccaucuacugcuc

SEQ ID NO: 1373185 - RNA, 19 nt, Human
ccgcagcaaacacagaacc

SEQ ID NO: 1373186 - RNA, 23 nt, Human
ccgcagcaaacacagaacccugu

SEQ ID NO: 1373187 - RNA, 26 nt, Human
ccgccuccugguucaagcaauucuuu

SEQ ID NO: 1373188 - RNA, 22 nt, Human
ccuagcucaucacuuucaugcu

SEQ ID NO: 1373189 - RNA, 18 nt, Human
ccucagagaagaaacagc

SEQ ID NO: 1373190 - RNA, 18 nt, Human
ccuccugccuucuccucc

SEQ ID NO: 1373191 - RNA, 22 nt, Human
ccuccugccuucuccucccuuc

SEQ ID NO: 1373192 - RNA, 23 nt, Human
ccuccugguucaagcaauucucc

SEQ ID NO: 1373193 - RNA, 19 nt, Human
ccucugaaggccuugcccc

SEQ ID NO: 1373194 - RNA, 23 nt, Human
ccugaguagcugggauuacaggc

SEQ ID NO: 1373195 - RNA, 24 nt, Human
ccugaguagcugggauuacaggca

SEQ ID NO: 1373196 - RNA, 18 nt, Human
ccugccuucuccucccuu

SEQ ID NO: 1373197 - RNA, 19 nt, Human
ccugguucaagcaauucuc

SEQ ID NO: 1373198 - RNA, 22 nt, Human
ccugguucaagcaauucuccug

SEQ ID NO: 1373199 - RNA, 24 nt, Human
ccugugucagccuccugaguagcu

SEQ ID NO: 1373200 - RNA, 21 nt, Human
cgaccaggagauaaaaaccac

SEQ ID NO: 1373201 - RNA, 26 nt, Human
cgcggcuaacuccccagcccagccuc

SEQ ID NO: 1373202 - RNA, 24 nt, Human
cgcugcugccgcugccgcugcggg

SEQ ID NO: 1373203 - RNA, 24 nt, Human
cguucuguugcccaggcuggagug

SEQ ID NO: 1373204 - RNA, 21 nt, Human
cuacgugccaagccucacccc

SEQ ID NO: 1373205 - RNA, 18 nt, Human
cuagagcccaacuuccca

SEQ ID NO: 1373206 - RNA, 30 nt, Human
cuaguaauccuauuaacauggcggcuuccc

SEQ ID NO: 1373207 - RNA, 24 nt, Human
cucacugcagccuccgccuccugg

SEQ ID NO: 1373208 - RNA, 18 nt, Human
cuccaaugcccuggaccu

SEQ ID NO: 1373209 - RNA, 18 nt, Human
cuccccagcccagccucc

SEQ ID NO: 1373210 - RNA, 20 nt, Human
cucccucauugucaaggguc

SEQ ID NO: 1373211 - RNA, 24 nt, Human
cuccugguucaagcaauucuccug

SEQ ID NO: 1373212 - RNA, 24 nt, Human
cucguucuguugcccaggcuggag

SEQ ID NO: 1373213 - RNA, 22 nt, Human
cucuccucuucuuaaaaagaag

SEQ ID NO: 1373214 - RNA, 22 nt, Human
cugaagaguccacugccuggca

SEQ ID NO: 1373215 - RNA, 24 nt, Human
cugaauuuaaccgacauuuauguu

SEQ ID NO: 1373216 - RNA, 24 nt, Human
cugacccauccguugguccccugg

SEQ ID NO: 1373217 - RNA, 23 nt, Human
cugagccucugguuccucaucug

SEQ ID NO: 1373218 - RNA, 23 nt, Human
cugaguagcugggauuacaggca

SEQ ID NO: 1373219 - RNA, 25 nt, Human
cuggccauuggcagccgcguggaca

SEQ ID NO: 1373220 - RNA, 20 nt, Human
cugggaccuuucccacucua

SEQ ID NO: 1373221 - RNA, 24 nt, Human
cugguucuagaacacaggggucac

SEQ ID NO: 1373222 - RNA, 18 nt, Human
cuuguucaucuuuaaaau

SEQ ID NO: 1373223 - RNA, 19 nt, Human
gaaaacugcagccagaagc

SEQ ID NO: 1373224 - RNA, 21 nt, Human
gaagaaaccacaggagaccaa

SEQ ID NO: 1373225 - RNA, 18 nt, Human
gaccacagcggcaagucc

SEQ ID NO: 1373226 - RNA, 19 nt, Human
gaccaggagauaaaaaccc

SEQ ID NO: 1373227 - RNA, 21 nt, Human
gagacagagucucguucuguu

SEQ ID NO: 1373228 - RNA, 18 nt, Human
gagcuuccuaaccagcuu

SEQ ID NO: 1373229 - RNA, 22 nt, Human
gaggugagugagcccccuucug

SEQ ID NO: 1373230 - RNA, 25 nt, Human
gaguagcugggauuacaggcacaug

SEQ ID NO: 1373231 - RNA, 21 nt, Human
gcaaacacagaacccugucuc

SEQ ID NO: 1373232 - RNA, 24 nt, Human
gcagcuucucagcaaccuccucag

SEQ ID NO: 1373233 - RNA, 25 nt, Human
gcaguacaguguggcagaagggccc

SEQ ID NO: 1373234 - RNA, 19 nt, Human
gccgcugcgggucagccgc

SEQ ID NO: 1373235 - RNA, 19 nt, Human
gccuugggaaggugugggg

SEQ ID NO: 1373236 - RNA, 20 nt, Human
gcggcuuccagggaagagug

SEQ ID NO: 1373237 - RNA, 19 nt, Human
gcuggagugcaguggcaca

SEQ ID NO: 1373238 - RNA, 20 nt, Human
gcuggcccuggccauuggcc

SEQ ID NO: 1373239 - RNA, 24 nt, Human
ggaaaacugcagccagaagcaccc

SEQ ID NO: 1373240 - RNA, 19 nt, Human
ggcagagagcucagugagc

SEQ ID NO: 1373241 - RNA, 23 nt, Human
ggcagagagcucagugagcugag

SEQ ID NO: 1373242 - RNA, 20 nt, Human
ggccuuguguaaaugugccc

SEQ ID NO: 1373243 - RNA, 23 nt, Human
ggcucugggcuucucgccuuggg

SEQ ID NO: 1373244 - RNA, 23 nt, Human
ggcucugggcuucucgggagagc

SEQ ID NO: 1373245 - RNA, 18 nt, Human
ggcugaggcaggagggag

SEQ ID NO: 1373246 - RNA, 23 nt, Human
ggcuggaggcugaggggccucca

SEQ ID NO: 1373247 - RNA, 21 nt, Human
ggcuggcccuggccauuggca

SEQ ID NO: 1373248 - RNA, 21 nt, Human
gggaugcugccuugggaaggu

SEQ ID NO: 1373249 - RNA, 22 nt, Human
gggcagcuucucagcaaccucc

SEQ ID NO: 1373250 - RNA, 20 nt, Human
gggcugagcagcgagcgucc

SEQ ID NO: 1373251 - RNA, 20 nt, Human
gggggugggggugggggugg

SEQ ID NO: 1373252 - RNA, 22 nt, Human
gggggugggggugggggugguu

SEQ ID NO: 1373253 - RNA, 18 nt, Human
guagcugggauuacaggc

SEQ ID NO: 1373254 - RNA, 18 nt, Human
gucagguucuuuugcacu

SEQ ID NO: 1373255 - RNA, 18 nt, Human
gucgaggccuccaaugcc

SEQ ID NO: 1373256 - RNA, 19 nt, Human
gucugguggcaaaggugcc

SEQ ID NO: 1373257 - RNA, 22 nt, Human
gugaucgguaagaacuggcagc

SEQ ID NO: 1373258 - RNA, 18 nt, Human
guggggcagagugacucc

SEQ ID NO: 1373259 - RNA, 20 nt, Human
gugucagccuccugaguagc

SEQ ID NO: 1373260 - RNA, 22 nt, Human
gugucagccuccugaguagcug

SEQ ID NO: 1373261 - RNA, 19 nt, Human
guguggggggugggggugg

SEQ ID NO: 1373262 - RNA, 23 nt, Human
guucuagaacacaggagaagcca

SEQ ID NO: 1373263 - RNA, 18 nt, Human
guucuguugcccaggcug

SEQ ID NO: 1373264 - RNA, 24 nt, Human
uaaaaacaagacacacgagugauu

SEQ ID NO: 1373265 - RNA, 19 nt, Human
uaaaauuccacgauuccuc

SEQ ID NO: 1373266 - RNA, 19 nt, Human
uaacuccccagcccagccu

SEQ ID NO: 1373267 - RNA, 19 nt, Human
uaagacggaccccggcuga

SEQ ID NO: 1373268 - RNA, 21 nt, Human
uacuuccaugucuucugacuc

SEQ ID NO: 1373269 - RNA, 24 nt, Human
uagcaagacggcgucguuggagga

SEQ ID NO: 1373270 - RNA, 22 nt, Human
uagggaaaacugcagccagaag

SEQ ID NO: 1373271 - RNA, 24 nt, Human
ucaaggauccccaaucugcccucu

SEQ ID NO: 1373272 - RNA, 21 nt, Human
ucaccccccuuucugacccau

SEQ ID NO: 1373273 - RNA, 19 nt, Human
ucacugcagccuccgccuc

SEQ ID NO: 1373274 - RNA, 23 nt, Human
ucacugcagccuccgccuccugg

SEQ ID NO: 1373275 - RNA, 24 nt, Human
ucacugcagccuccgccuccuggu

SEQ ID NO: 1373276 - RNA, 26 nt, Human
ucacugcagccuccgccuccugguuc

SEQ ID NO: 1373277 - RNA, 20 nt, Human
ucagccuccugaguagcugg

SEQ ID NO: 1373278 - RNA, 19 nt, Human
ucaucacuuucaugcugug

SEQ ID NO: 1373279 - RNA, 24 nt, Human
uccacaaaccugccuggugaccac

SEQ ID NO: 1373280 - RNA, 22 nt, Human
uccauagggaaaacugcagcca

SEQ ID NO: 1373281 - RNA, 19 nt, Human
uccaugaaagcucccccca

SEQ ID NO: 1373282 - RNA, 21 nt, Human
uccauggugucgcugcagcca

SEQ ID NO: 1373283 - RNA, 21 nt, Human
uccccagcccagccuccaccc

SEQ ID NO: 1373284 - RNA, 25 nt, Human
uccccccaucaugggcagcugcgcg

SEQ ID NO: 1373285 - RNA, 24 nt, Human
uccgaccaggagauaaaaaccacc

SEQ ID NO: 1373286 - RNA, 23 nt, Human
uccgccuccugguucaagcaauu

SEQ ID NO: 1373287 - RNA, 19 nt, Human
uccuccacaaaccugccug

SEQ ID NO: 1373288 - RNA, 24 nt, Human
uccugaguagcugggauuacaggc

SEQ ID NO: 1373289 - RNA, 27 nt, Human
ucgcugcugccgcugccgcugcgggaa

SEQ ID NO: 1373290 - RNA, 24 nt, Human
ucguucuguugcccaggcuggagu

SEQ ID NO: 1373291 - RNA, 18 nt, Human
ucuccacuacagagggug

SEQ ID NO: 1373292 - RNA, 23 nt, Human
ucuccucccuucaccgcagcaaa

SEQ ID NO: 1373293 - RNA, 20 nt, Human
ucucgcacccaccuucaaga

SEQ ID NO: 1373294 - RNA, 23 nt, Human
ucucguucuguugcccaggcugg

SEQ ID NO: 1373295 - RNA, 24 nt, Human
ucucguucuguugcccaggcugga

SEQ ID NO: 1373296 - RNA, 21 nt, Human
ucucugggcuucuggcuccag

SEQ ID NO: 1373297 - RNA, 18 nt, Human
ucuguugcccaggcugga

SEQ ID NO: 1373298 - RNA, 24 nt, Human
ucuguugcccaggcuggagugcag

SEQ ID NO: 1373299 - RNA, 20 nt, Human
ucuuaaaaagaagagaaagg

SEQ ID NO: 1373300 - RNA, 18 nt, Human
ucuuccggcuggcccugg

SEQ ID NO: 1373301 - RNA, 25 nt, Human
ugaaaccagaauugggucaggaaca

SEQ ID NO: 1373302 - RNA, 24 nt, Human
ugaagaaaccacaggagaccaaga

SEQ ID NO: 1373303 - RNA, 22 nt, Human
ugacagaugugaucgguaagaa

SEQ ID NO: 1373304 - RNA, 23 nt, Human
ugacccauccguugaauaauuca

SEQ ID NO: 1373305 - RNA, 24 nt, Human
ugaccucaggaaggcaacuucacu

SEQ ID NO: 1373306 - RNA, 23 nt, Human
ugagcaggcacugucuggagcca

SEQ ID NO: 1373307 - RNA, 19 nt, Human
ugcacucgugaccuccccu

SEQ ID NO: 1373308 - RNA, 23 nt, Human
ugcagccagaagcacccggugcc

SEQ ID NO: 1373309 - RNA, 22 nt, Human
ugcaguggcacaaucucagcuc

SEQ ID NO: 1373310 - RNA, 18 nt, Human
ugccaggaccccagaugc

SEQ ID NO: 1373311 - RNA, 27 nt, Human
ugccagugauuccaggaauuccagaca

SEQ ID NO: 1373312 - RNA, 18 nt, Human
ugcccaggcuggagugca

SEQ ID NO: 1373313 - RNA, 22 nt, Human
ugcccaggcuggagugcagugg

SEQ ID NO: 1373314 - RNA, 24 nt, Human
ugcccaggcuggagugcaguggca

SEQ ID NO: 1373315 - RNA, 21 nt, Human
ugccccagcaccccacgcccu

SEQ ID NO: 1373316 - RNA, 22 nt, Human
ugcccuggaggugccacccagu

SEQ ID NO: 1373317 - RNA, 23 nt, Human
ugccuggacauucuccugagggc

SEQ ID NO: 1373318 - RNA, 18 nt, Human
ugccuggcacaucuagcu

SEQ ID NO: 1373319 - RNA, 19 nt, Human
ugccugggaugcuggaguc

SEQ ID NO: 1373320 - RNA, 18 nt, Human
ugccuugggaaggugugg

SEQ ID NO: 1373321 - RNA, 27 nt, Human
ugcuaagacggaccccggcugaggcag

SEQ ID NO: 1373322 - RNA, 22 nt, Human
ugcuggagacagagccauucac

SEQ ID NO: 1373323 - RNA, 21 nt, Human
uggaagccagagcuggcccag

SEQ ID NO: 1373324 - RNA, 18 nt, Human
uggacacaaaacuuaagc

SEQ ID NO: 1373325 - RNA, 18 nt, Human
uggaggcugaggggccuc

SEQ ID NO: 1373326 - RNA, 18 nt, Human
uggagugcaguggcacaa

SEQ ID NO: 1373327 - RNA, 23 nt, Human
uggagugcaguggcacaaucuca

SEQ ID NO: 1373328 - RNA, 24 nt, Human
uggagugcaguggcacaaucucag

SEQ ID NO: 1373329 - RNA, 24 nt, Human
uggcacaaucucagcucacugcag

SEQ ID NO: 1373330 - RNA, 24 nt, Human
uggcagaaggcaguacagucuggc

SEQ ID NO: 1373331 - RNA, 22 nt, Human
uggcagccgcguggacauuggc

SEQ ID NO: 1373332 - RNA, 23 nt, Human
uggccagaaauccagccuuugcu

SEQ ID NO: 1373333 - RNA, 23 nt, Human
uggcccaggccacaccaugacgg

SEQ ID NO: 1373334 - RNA, 19 nt, Human
uggcucugggcuucucgcc

SEQ ID NO: 1373335 - RNA, 20 nt, Human
ugggaugcugccuugggaag

SEQ ID NO: 1373336 - RNA, 21 nt, Human
ugggauuacaggcacaugcca

SEQ ID NO: 1373337 - RNA, 22 nt, Human
ugggauuacaggcacaugccac

SEQ ID NO: 1373338 - RNA, 23 nt, Human
ugggauuacaggcacaugccaca

SEQ ID NO: 1373339 - RNA, 19 nt, Human
ugggcgaguccaugaaagc

SEQ ID NO: 1373340 - RNA, 19 nt, Human
uggggcagagagcucagug

SEQ ID NO: 1373341 - RNA, 19 nt, Human
ugggggguggggguggggg

SEQ ID NO: 1373342 - RNA, 21 nt, Human
uggggggugggggugggggug

SEQ ID NO: 1373343 - RNA, 21 nt, Human
ugggggugggggugguuccug

SEQ ID NO: 1373344 - RNA, 18 nt, Human
ugggguuugauggagaga

SEQ ID NO: 1373345 - RNA, 21 nt, Human
ugguucuagaacacaggagaa

SEQ ID NO: 1373346 - RNA, 25 nt, Human
ugugcacuggggcgaugaugcugug

SEQ ID NO: 1373347 - RNA, 20 nt, Human
uguggccagaaauccagccc

SEQ ID NO: 1373348 - RNA, 18 nt, Human
uguggggggugggggugg

SEQ ID NO: 1373349 - RNA, 19 nt, Human
ugugggggguggggguggg

SEQ ID NO: 1373350 - RNA, 22 nt, Human
uguggggggugggggugggggu

SEQ ID NO: 1373351 - RNA, 19 nt, Human
uuaaggaaguggcuugggc

SEQ ID NO: 1373352 - RNA, 21 nt, Human
uuacaggggucaggcccuccu

SEQ ID NO: 1373353 - RNA, 20 nt, Human
uucacgcacaccgcggcuaa

SEQ ID NO: 1373354 - RNA, 24 nt, Human
uucacgcacaccgcggcuaacucc

SEQ ID NO: 1373355 - RNA, 24 nt, Human
uuccaaacugcuaagacggacccc

SEQ ID NO: 1373356 - RNA, 20 nt, Human
uuccucagagaagaaacagc

SEQ ID NO: 1373357 - RNA, 19 nt, Human
uucugggaccuuucccacu

SEQ ID NO: 1373358 - RNA, 19 nt, Human
uucuguuccgacuccucca

SEQ ID NO: 1373359 - RNA, 24 nt, Human
uugcccaggcuggagugcaguggc

SEQ ID NO: 1373360 - RNA, 20 nt, Human
uugggaagguguggggggug

SEQ ID NO: 1373361 - RNA, 23 nt, Human
uuucaaagucaaacuaggaacau

SEQ ID NO: 1373362 - RNA, 20 nt, Human
uuugcaguguauaaagugag

SEQ ID NO: 1373363 - RNA, 18 nt, Human
uuugcuccuuaaucagac

SEQ ID NO: 1373364 - RNA, 21 nt, Human
aaaaaaaggagaacaacaaaa

SEQ ID NO: 1373365 - RNA, 23 nt, Human
aaaaaaaggagaacaacaaaaaa

SEQ ID NO: 1373366 - RNA, 23 nt, Human
aaaaaggagaacaacaaaaaauc

SEQ ID NO: 1373367 - RNA, 24 nt, Human
aaaaaggagaacaacaaaaaaucc

SEQ ID NO: 1373368 - RNA, 18 nt, Human
aaagcuggcauccucuaa

SEQ ID NO: 1373369 - RNA, 21 nt, Human
aacaaaaaauccaacaacagc

SEQ ID NO: 1373370 - RNA, 20 nt, Human
aacaucguuccuggaggagg

SEQ ID NO: 1373371 - RNA, 18 nt, Human
aaccgaucuaaaacuucu

SEQ ID NO: 1373372 - RNA, 18 nt, Human
aaccgaucuaaaacuucu

SEQ ID NO: 1373373 - RNA, 19 nt, Human
aacucgcuucuaccuucag

SEQ ID NO: 1373374 - RNA, 18 nt, Human
aagaaggcauauuaaaac

SEQ ID NO: 1373375 - RNA, 21 nt, Human
aagcuccaaacaucguuccug

SEQ ID NO: 1373376 - RNA, 22 nt, Human
aaggcauauuaaaacuucugag

SEQ ID NO: 1373377 - RNA, 19 nt, Human
acaaaaaaaggagaacaac

SEQ ID NO: 1373378 - RNA, 22 nt, Human
acaaaaaauccaacaacagcug

SEQ ID NO: 1373379 - RNA, 20 nt, Human
acaacagcugcacauaccac

SEQ ID NO: 1373380 - RNA, 19 nt, Human
accaguucccauggaaaac

SEQ ID NO: 1373381 - RNA, 25 nt, Human
acuacaauuccauuaaacuucaauu

SEQ ID NO: 1373382 - RNA, 21 nt, Human
agguagggcugagggguagca

SEQ ID NO: 1373383 - RNA, 18 nt, Human
agucagggucuugaugug

SEQ ID NO: 1373384 - RNA, 22 nt, Human
aucuuuuauugcuauugcccau

SEQ ID NO: 1373385 - RNA, 21 nt, Human
auuaaaacuucugaguucuga

SEQ ID NO: 1373386 - RNA, 24 nt, Human
auuaguccagaaagcguuucacca

SEQ ID NO: 1373387 - RNA, 22 nt, Human
cacaacucugcguagcuccucc

SEQ ID NO: 1373388 - RNA, 25 nt, Human
cacauuuaaacuaccaggaucaucu

SEQ ID NO: 1373389 - RNA, 20 nt, Human
caccaaguuuuuucucucuu

SEQ ID NO: 1373390 - RNA, 22 nt, Human
cacuuguucuuuccauacuuca

SEQ ID NO: 1373391 - RNA, 20 nt, Human
ccacaaaaaaaggagaacaa

SEQ ID NO: 1373392 - RNA, 21 nt, Human
ccacuggaaacaauggaccac

SEQ ID NO: 1373393 - RNA, 18 nt, Human
ccuccaggaccagcccca

SEQ ID NO: 1373394 - RNA, 24 nt, Human
ccuccaggaccagccccagguagg

SEQ ID NO: 1373395 - RNA, 23 nt, Human
ccuccauagcgcgaaggcugcuc

SEQ ID NO: 1373396 - RNA, 21 nt, Human
ccuucagaaugugggguuggg

SEQ ID NO: 1373397 - RNA, 21 nt, Human
cuccauagcgcgaaggcugcu

SEQ ID NO: 1373398 - RNA, 21 nt, Human
cuccuccaggaccagccccag

SEQ ID NO: 1373399 - RNA, 19 nt, Human
cuggcuuucgugaaguuga

SEQ ID NO: 1373400 - RNA, 19 nt, Human
gacccagugucagaaggag

SEQ ID NO: 1373401 - RNA, 25 nt, Human
gagauuguauccuuuuagaaauauc

SEQ ID NO: 1373402 - RNA, 22 nt, Human
gaggaagagcugaaucaggaua

SEQ ID NO: 1373403 - RNA, 20 nt, Human
gaggaauaaagccggggcca

SEQ ID NO: 1373404 - RNA, 19 nt, Human
gcauauuaaaacuucugag

SEQ ID NO: 1373405 - RNA, 23 nt, Human
gcugcacauaccaccaguuccca

SEQ ID NO: 1373406 - RNA, 21 nt, Human
ggaaacaucauccuauggucc

SEQ ID NO: 1373407 - RNA, 25 nt, Human
ggagaacaacaaaaaauccaacaac

SEQ ID NO: 1373408 - RNA, 21 nt, Human
ggagguugggggaaaagaggu

SEQ ID NO: 1373409 - RNA, 25 nt, Human
gggcaccuuguguccacuggaaaca

SEQ ID NO: 1373410 - RNA, 20 nt, Human
gggguugggguaaaauccag

SEQ ID NO: 1373411 - RNA, 21 nt, Human
guagugcugccacaacucugc

SEQ ID NO: 1373412 - RNA, 18 nt, Human
guugggguaaaauccagg

SEQ ID NO: 1373413 - RNA, 23 nt, Human
guuuuuucucucuucccacauaa

SEQ ID NO: 1373414 - RNA, 25 nt, Human
uaaccgaucuaaaacuucuccacaa

SEQ ID NO: 1373415 - RNA, 21 nt, Human
uacuuaaacugaaaaugagau

SEQ ID NO: 1373416 - RNA, 26 nt, Human
uaguggauuccauuucugaaggcauu

SEQ ID NO: 1373417 - RNA, 23 nt, Human
uauugcccaucguucuucagucg

SEQ ID NO: 1373418 - RNA, 19 nt, Human
uccacuggaaacaauggac

SEQ ID NO: 1373419 - RNA, 20 nt, Human
ucccacauaaagccgacucc

SEQ ID NO: 1373420 - RNA, 18 nt, Human
uccuccaggaccagcccc

SEQ ID NO: 1373421 - RNA, 19 nt, Human
ucuaaagaugacucuacuu

SEQ ID NO: 1373422 - RNA, 23 nt, Human
ucuaucagaauuagaauaaaauc

SEQ ID NO: 1373423 - RNA, 20 nt, Human
ucuggauguucaguagcagg

SEQ ID NO: 1373424 - RNA, 24 nt, Human
ucuuuuauugcuauugcccaucgu

SEQ ID NO: 1373425 - RNA, 25 nt, Human
ugaauaaggcuaaauuuuucaagua

SEQ ID NO: 1373426 - RNA, 24 nt, Human
ugagaaaaguguaaucacuuaagu

SEQ ID NO: 1373427 - RNA, 24 nt, Human
ugauuggagcaagagguggaggaa

SEQ ID NO: 1373428 - RNA, 20 nt, Human
ugauuuuggcuucagcuauu

SEQ ID NO: 1373429 - RNA, 24 nt, Human
uggacagauguuucucauugcaaa

SEQ ID NO: 1373430 - RNA, 19 nt, Human
uggaggagguugggggaaa

SEQ ID NO: 1373431 - RNA, 26 nt, Human
uggaggagguugggggaaaagagguc

SEQ ID NO: 1373432 - RNA, 18 nt, Human
uggaugaaaguaaggagg

SEQ ID NO: 1373433 - RNA, 24 nt, Human
ugguggaccugggaaaucccuugg

SEQ ID NO: 1373434 - RNA, 24 nt, Human
ugucagaaggagcucugugaggau

SEQ ID NO: 1373435 - RNA, 23 nt, Human
uguggaggaagagcugaaucagg

SEQ ID NO: 1373436 - RNA, 19 nt, Human
uuagaauaaaaucugucuu

SEQ ID NO: 1373437 - RNA, 21 nt, Human
uuagaauaaaaucugucuucc

SEQ ID NO: 1373438 - RNA, 22 nt, Human
uucgugcuucugcuaccgccuu

SEQ ID NO: 1373439 - RNA, 22 nt, Human
uugcagaugauuuuggcuucag

SEQ ID NO: 1373440 - RNA, 19 nt, Human
uuggagcaagagguggagg

SEQ ID NO: 1373441 - RNA, 20 nt, Human
uugggguaaaauccaggucu

SEQ ID NO: 1373442 - RNA, 25 nt, Human
uuuggagucuucaaauguuauuuuc

SEQ ID NO: 1373443 - RNA, 23 nt, Human
aaaaauucccuaacugcaguguc

SEQ ID NO: 1373444 - RNA, 20 nt, Human
aaccaagccacccagcucgg

SEQ ID NO: 1373445 - RNA, 22 nt, Human
aaccaagccacccagcucggcc

SEQ ID NO: 1373446 - RNA, 20 nt, Human
aacucccauccagcagccuc

SEQ ID NO: 1373447 - RNA, 19 nt, Human
aagcagcuugcgaucuugg

SEQ ID NO: 1373448 - RNA, 24 nt, Human
aagcagcuugcgaucuuggccucc

SEQ ID NO: 1373449 - RNA, 20 nt, Human
aagccacccagcucggccag

SEQ ID NO: 1373450 - RNA, 22 nt, Human
accaagccacccagcucggcca

SEQ ID NO: 1373451 - RNA, 22 nt, Human
acccuggguccacccucccaau

SEQ ID NO: 1373452 - RNA, 26 nt, Human
agcucugcggccccaaaacacucccc

SEQ ID NO: 1373453 - RNA, 21 nt, Human
agcugcucgcagccgcgggcg

SEQ ID NO: 1373454 - RNA, 24 nt, Human
aggcagcggcucggcgggcagcgc

SEQ ID NO: 1373455 - RNA, 21 nt, Human
agucccuggugcacacaaccc

SEQ ID NO: 1373456 - RNA, 20 nt, Human
aucgccaccgugugcgugag

SEQ ID NO: 1373457 - RNA, 22 nt, Human
augacccuggguccacccuccc

SEQ ID NO: 1373458 - RNA, 23 nt, Human
caaacccgacgcgcccuccgccu

SEQ ID NO: 1373459 - RNA, 19 nt, Human
cacaacccugaagagcggc

SEQ ID NO: 1373460 - RNA, 19 nt, Human
cacccagcucggccagaag

SEQ ID NO: 1373461 - RNA, 20 nt, Human
cacgcagauagaccucccac

SEQ ID NO: 1373462 - RNA, 19 nt, Human
cagagugacucccugggcu

SEQ ID NO: 1373463 - RNA, 19 nt, Human
cagcggcgcggcgugcgca

SEQ ID NO: 1373464 - RNA, 19 nt, Human
cagcggcucggcgggcagc

SEQ ID NO: 1373465 - RNA, 21 nt, Human
cagcggcucggcgggcagcgc

SEQ ID NO: 1373466 - RNA, 22 nt, Human
cagcuuucagccgcccaacugg

SEQ ID NO: 1373467 - RNA, 19 nt, Human
caggagcggaggcagcggc

SEQ ID NO: 1373468 - RNA, 20 nt, Human
caucuaacggaaggguuggu

SEQ ID NO: 1373469 - RNA, 19 nt, Human
ccacacguccggcgccagg

SEQ ID NO: 1373470 - RNA, 21 nt, Human
cccaccccgcgcccggccgcc

SEQ ID NO: 1373471 - RNA, 23 nt, Human
cccauccagcagccucccugccc

SEQ ID NO: 1373472 - RNA, 18 nt, Human
ccccaaaacacuccccuc

SEQ ID NO: 1373473 - RNA, 22 nt, Human
ccccgaaggcccaccccgcgcc

SEQ ID NO: 1373474 - RNA, 24 nt, Human
ccccgcacugagcgugccucccag

SEQ ID NO: 1373475 - RNA, 18 nt, Human
ccccuccagcuuucagcc

SEQ ID NO: 1373476 - RNA, 20 nt, Human
cccgcaaacucccauccagc

SEQ ID NO: 1373477 - RNA, 23 nt, Human
cccgcacugagcgugccucccag

SEQ ID NO: 1373478 - RNA, 23 nt, Human
cccgcugcgccuccagcccgccc

SEQ ID NO: 1373479 - RNA, 22 nt, Human
cccuacgcagacuccucccucc

SEQ ID NO: 1373480 - RNA, 24 nt, Human
cccuccgccuccccgaaggcccac

SEQ ID NO: 1373481 - RNA, 22 nt, Human
cccugggcuccuggcugacccc

SEQ ID NO: 1373482 - RNA, 21 nt, Human
ccgcaaacucccauccagcag

SEQ ID NO: 1373483 - RNA, 26 nt, Human
ccgcccagugacucugcuccagcugc

SEQ ID NO: 1373484 - RNA, 21 nt, Human
ccgcggguccccugguagccc

SEQ ID NO: 1373485 - RNA, 22 nt, Human
ccgcugcgccuccagcccgccc

SEQ ID NO: 1373486 - RNA, 23 nt, Human
ccggcccccccucgagccagaga

SEQ ID NO: 1373487 - RNA, 18 nt, Human
ccggccgccuucacgugc

SEQ ID NO: 1373488 - RNA, 21 nt, Human
ccuccagcccgccccgcugug

SEQ ID NO: 1373489 - RNA, 26 nt, Human
ccuccgccuccccgaaggcccacccc

SEQ ID NO: 1373490 - RNA, 25 nt, Human
ccuccugccgcaccuucugcagguc

SEQ ID NO: 1373491 - RNA, 21 nt, Human
ccugaaaugccuccugcacgg

SEQ ID NO: 1373492 - RNA, 23 nt, Human
ccugacagcugcgcuuggcugcu

SEQ ID NO: 1373493 - RNA, 20 nt, Human
ccugagcuccucgcaggcgu

SEQ ID NO: 1373494 - RNA, 25 nt, Human
ccugcagcaccucggggaccucggc

SEQ ID NO: 1373495 - RNA, 20 nt, Human
cgcaccgccuccucccagug

SEQ ID NO: 1373496 - RNA, 18 nt, Human
cgcagggugguggccucc

SEQ ID NO: 1373497 - RNA, 21 nt, Human
cgccagaaaagccuuuucaaa

SEQ ID NO: 1373498 - RNA, 23 nt, Human
cgccuccgacgccagaaaagccu

SEQ ID NO: 1373499 - RNA, 18 nt, Human
cgcgcgagcuccuggagg

SEQ ID NO: 1373500 - RNA, 18 nt, Human
cgcgugcagauucgcagg

SEQ ID NO: 1373501 - RNA, 23 nt, Human
cgcucuccagucgggcccacacg

SEQ ID NO: 1373502 - RNA, 20 nt, Human
cggcccccccucgagccaga

SEQ ID NO: 1373503 - RNA, 20 nt, Human
cgggcagcgccagccccggg

SEQ ID NO: 1373504 - RNA, 22 nt, Human
cggggcgcccaggaagucagga

SEQ ID NO: 1373505 - RNA, 21 nt, Human
cucccaucuaacggaaggguu

SEQ ID NO: 1373506 - RNA, 20 nt, Human
cucccugggcuccuggcuga

SEQ ID NO: 1373507 - RNA, 20 nt, Human
cugaggaugcguccgcaccu

SEQ ID NO: 1373508 - RNA, 24 nt, Human
cugcagcaccucggggaccucggc

SEQ ID NO: 1373509 - RNA, 26 nt, Human
cugcagguggccgucaccaggggcuu

SEQ ID NO: 1373510 - RNA, 20 nt, Human
cugcuccagcugcaagaugc

SEQ ID NO: 1373511 - RNA, 22 nt, Human
cugggccacggcgcuguggaag

SEQ ID NO: 1373512 - RNA, 21 nt, Human
cuucucagccccugcucccgg

SEQ ID NO: 1373513 - RNA, 25 nt, Human
cuucuggaagcugcagguggccguc

SEQ ID NO: 1373514 - RNA, 19 nt, Human
gaaccuggagagaagacug

SEQ ID NO: 1373515 - RNA, 24 nt, Human
gacgccccuucucagccccugcuc

SEQ ID NO: 1373516 - RNA, 18 nt, Human
gagcgugccucccagccc

SEQ ID NO: 1373517 - RNA, 24 nt, Human
gcacugagcgugccucccagcccc

SEQ ID NO: 1373518 - RNA, 18 nt, Human
gcagcggcucggcgggca

SEQ ID NO: 1373519 - RNA, 23 nt, Human
gcccgauaggcagcauugagagc

SEQ ID NO: 1373520 - RNA, 21 nt, Human
gcccugaagcaagugcuucug

SEQ ID NO: 1373521 - RNA, 21 nt, Human
gccuccaggaagcugguguag

SEQ ID NO: 1373522 - RNA, 23 nt, Human
gcggaggcagcggcucggcgggc

SEQ ID NO: 1373523 - RNA, 23 nt, Human
gcuucgccgcaccgccuccuccc

SEQ ID NO: 1373524 - RNA, 20 nt, Human
ggaccucggcggccgcccag

SEQ ID NO: 1373525 - RNA, 20 nt, Human
ggccgcggguccccugguag

SEQ ID NO: 1373526 - RNA, 18 nt, Human
ggggggagaagggugggc

SEQ ID NO: 1373527 - RNA, 20 nt, Human
gguagcccccgcugcgccuc

SEQ ID NO: 1373528 - RNA, 18 nt, Human
uauggacguccauggaca

SEQ ID NO: 1373529 - RNA, 18 nt, Human
uccauggacagcggcgcc

SEQ ID NO: 1373530 - RNA, 19 nt, Human
ucccauccagcagccuccc

SEQ ID NO: 1373531 - RNA, 19 nt, Human
uccccgaaggcccaccccg

SEQ ID NO: 1373532 - RNA, 23 nt, Human
uccccgaaggcccaccccgcgcc

SEQ ID NO: 1373533 - RNA, 18 nt, Human
uccccgauuuccccccgc

SEQ ID NO: 1373534 - RNA, 22 nt, Human
uccccugguagcccccgcugcg

SEQ ID NO: 1373535 - RNA, 22 nt, Human
ucccuagcugcgcgaugacccu

SEQ ID NO: 1373536 - RNA, 18 nt, Human
uccugcacggcugcuccu

SEQ ID NO: 1373537 - RNA, 19 nt, Human
uccugcgucagccaguccc

SEQ ID NO: 1373538 - RNA, 18 nt, Human
ucgccgcaccgccuccuc

SEQ ID NO: 1373539 - RNA, 20 nt, Human
ucgccgcaccgccuccuccc

SEQ ID NO: 1373540 - RNA, 24 nt, Human
ucgggcccacacguccggcgccag

SEQ ID NO: 1373541 - RNA, 20 nt, Human
ucggggggagaagggugggc

SEQ ID NO: 1373542 - RNA, 25 nt, Human
ucuccagcuccucuuggggggccgc

SEQ ID NO: 1373543 - RNA, 22 nt, Human
ucuccagcuccucuuggguucc

SEQ ID NO: 1373544 - RNA, 24 nt, Human
ucugcucuucacuuucagacugga

SEQ ID NO: 1373545 - RNA, 21 nt, Human
ucuucacuuucagacuggagg

SEQ ID NO: 1373546 - RNA, 22 nt, Human
ugaaaugccuccugcacggcug

SEQ ID NO: 1373547 - RNA, 21 nt, Human
ugaacagacgccccuucucag

SEQ ID NO: 1373548 - RNA, 21 nt, Human
ugacccuggguccacccuccc

SEQ ID NO: 1373549 - RNA, 30 nt, Human
ugacucccugggcuccuggcugacccccuc

SEQ ID NO: 1373550 - RNA, 20 nt, Human
ugagcuccucgcaggcguug

SEQ ID NO: 1373551 - RNA, 20 nt, Human
ugauguaggcgcccaggugc

SEQ ID NO: 1373552 - RNA, 21 nt, Human
ugcaagaugcugucgaagcag

SEQ ID NO: 1373553 - RNA, 23 nt, Human
ugccguagacguuggcggcccag

SEQ ID NO: 1373554 - RNA, 22 nt, Human
ugcgugaggcuugaacagacgc

SEQ ID NO: 1373555 - RNA, 24 nt, Human
ugcgugaggcuugaacagacgccc

SEQ ID NO: 1373556 - RNA, 19 nt, Human
uggccuccagcuccgcgga

SEQ ID NO: 1373557 - RNA, 22 nt, Human
uggccugacagcugcgcuuggc

SEQ ID NO: 1373558 - RNA, 19 nt, Human
uggcugacccccacugacc

SEQ ID NO: 1373559 - RNA, 25 nt, Human
ugggacuggauaggaauucguucug

SEQ ID NO: 1373560 - RNA, 22 nt, Human
uggguuccugggaaccuggaga

SEQ ID NO: 1373561 - RNA, 19 nt, Human
ugguagaggcccugcagca

SEQ ID NO: 1373562 - RNA, 19 nt, Human
ugguggccuccagcuccgc

SEQ ID NO: 1373563 - RNA, 18 nt, Human
uucucagccccugcuccc

SEQ ID NO: 1373564 - RNA, 23 nt, Human
uucucagccccugcucccgggcc

SEQ ID NO: 1373565 - RNA, 24 nt, Human
aaagugcugggguuacagguguga

SEQ ID NO: 1373566 - RNA, 24 nt, Human
aagcuggucucgagccgugacaca

SEQ ID NO: 1373567 - RNA, 19 nt, Human
aaguagcugggauuacagg

SEQ ID NO: 1373568 - RNA, 26 nt, Human
aagugcugggguuacaggugugagcc

SEQ ID NO: 1373569 - RNA, 19 nt, Human
acaggcgcccgccaccacg

SEQ ID NO: 1373570 - RNA, 24 nt, Human
accauguuggccaagcuggucucg

SEQ ID NO: 1373571 - RNA, 18 nt, Human
acuuccacaacaagggau

SEQ ID NO: 1373572 - RNA, 22 nt, Human
agacuaccuuccaccaccacuu

SEQ ID NO: 1373573 - RNA, 24 nt, Human
agcgauucuccugccucagccucc

SEQ ID NO: 1373574 - RNA, 24 nt, Human
agcuccgcccaccacaccaacgcu

SEQ ID NO: 1373575 - RNA, 24 nt, Human
agcuggucucgagcuccugaccuc

SEQ ID NO: 1373576 - RNA, 20 nt, Human
aggcgcccgccaccacgccu

SEQ ID NO: 1373577 - RNA, 23 nt, Human
aguagcugggauuacaggcgccc

SEQ ID NO: 1373578 - RNA, 19 nt, Human
agugauccacccaccucag

SEQ ID NO: 1373579 - RNA, 20 nt, Human
agugcaguggcgggaucucg

SEQ ID NO: 1373580 - RNA, 23 nt, Human
agugcaguggcgggaucucggcu

SEQ ID NO: 1373581 - RNA, 24 nt, Human
agugcaguggcgggaucucggcuc

SEQ ID NO: 1373582 - RNA, 24 nt, Human
caaagugcugggguuacaggugug

SEQ ID NO: 1373583 - RNA, 22 nt, Human
caagcgauucuccugccucagc

SEQ ID NO: 1373584 - RNA, 27 nt, Human
caagcgauucuccugccucagccuccc

SEQ ID NO: 1373585 - RNA, 19 nt, Human
caagugauccacccaccuc

SEQ ID NO: 1373586 - RNA, 21 nt, Human
cacagaggacuccagaagcca

SEQ ID NO: 1373587 - RNA, 18 nt, Human
caccacuugcaucuguca

SEQ ID NO: 1373588 - RNA, 21 nt, Human
caccauguuggccaagcuggu

SEQ ID NO: 1373589 - RNA, 24 nt, Human
caccauguuggccaagcuggucuc

SEQ ID NO: 1373590 - RNA, 22 nt, Human
cacccaccucagccucccaaag

SEQ ID NO: 1373591 - RNA, 23 nt, Human
cacccaccucagccucccaaagu

SEQ ID NO: 1373592 - RNA, 24 nt, Human
caccucagccucccaaagugcugg

SEQ ID NO: 1373593 - RNA, 24 nt, Human
caccugggcuggagugcaguggcg

SEQ ID NO: 1373594 - RNA, 21 nt, Human
cagaggacuccagaagccagg

SEQ ID NO: 1373595 - RNA, 23 nt, Human
cauguuggccaagcuggucucga

SEQ ID NO: 1373596 - RNA, 20 nt, Human
ccaaagugcugggguuacag

SEQ ID NO: 1373597 - RNA, 21 nt, Human
ccaaagugcugggguuacagg

SEQ ID NO: 1373598 - RNA, 24 nt, Human
ccaaagugcugggguuacaggugu

SEQ ID NO: 1373599 - RNA, 22 nt, Human
ccaaguagcugggauuacaggc

SEQ ID NO: 1373600 - RNA, 26 nt, Human
ccacccaccucagccucccaaagugc

SEQ ID NO: 1373601 - RNA, 23 nt, Human
cccaaguagcugggauuacaggc

SEQ ID NO: 1373602 - RNA, 23 nt, Human
cccaaguagcugggauuacaggc

SEQ ID NO: 1373603 - RNA, 24 nt, Human
ccgccucccagauucaagcgauuc

SEQ ID NO: 1373604 - RNA, 24 nt, Human
ccucccagauucaagcgauucucc

SEQ ID NO: 1373605 - RNA, 24 nt, Human
ccugaccucaagugauccacccac

SEQ ID NO: 1373606 - RNA, 23 nt, Human
ccugccucagccucccaaguagc

SEQ ID NO: 1373607 - RNA, 25 nt, Human
ccuuccaccaccacuugcaucuguc

SEQ ID NO: 1373608 - RNA, 24 nt, Human
cgcucugucaccugggcuggagug

SEQ ID NO: 1373609 - RNA, 24 nt, Human
cucaagugauccacccaccucagc

SEQ ID NO: 1373610 - RNA, 22 nt, Human
cucacagaggacuccagaagcc

SEQ ID NO: 1373611 - RNA, 24 nt, Human
cucagccucccaaguagcugggau

SEQ ID NO: 1373612 - RNA, 24 nt, Human
cucgcucugucaccugggcuggag

SEQ ID NO: 1373613 - RNA, 23 nt, Human
cucugucaccugggcuggagugc

SEQ ID NO: 1373614 - RNA, 24 nt, Human
cugcaaucuccgccucccagauuc

SEQ ID NO: 1373615 - RNA, 23 nt, Human
cugccucagccucccaaguagcu

SEQ ID NO: 1373616 - RNA, 24 nt, Human
gaccucaagugauccacccaccuc

SEQ ID NO: 1373617 - RNA, 19 nt, Human
gagccgccgaggccggcca

SEQ ID NO: 1373618 - RNA, 19 nt, Human
gagcgaccugagggcaaca

SEQ ID NO: 1373619 - RNA, 18 nt, Human
gauuacaggcgcccgcca

SEQ ID NO: 1373620 - RNA, 22 nt, Human
gcaaucuccgccucccagauuc

SEQ ID NO: 1373621 - RNA, 20 nt, Human
gccaagcuggucucgagcuc

SEQ ID NO: 1373622 - RNA, 24 nt, Human
gccuggcuaauuuuuuuguauuuu

SEQ ID NO: 1373623 - RNA, 24 nt, Human
gcgauucuccugccucagccuccc

SEQ ID NO: 1373624 - RNA, 24 nt, Human
ggcuggagugcaguggcgggaucu

SEQ ID NO: 1373625 - RNA, 19 nt, Human
ggucucgagcuccugaccu

SEQ ID NO: 1373626 - RNA, 23 nt, Human
guagagacgggggcucaccaugu

SEQ ID NO: 1373627 - RNA, 18 nt, Human
guagcugggauuacaggc

SEQ ID NO: 1373628 - RNA, 24 nt, Human
gugauccacccaccucagccuccc

SEQ ID NO: 1373629 - RNA, 22 nt, Human
uacaggcgcccgccaccacgcc

SEQ ID NO: 1373630 - RNA, 22 nt, Human
uagagacgggggcucaccaugu

SEQ ID NO: 1373631 - RNA, 24 nt, Human
uaguagagacgggggcucaccaug

SEQ ID NO: 1373632 - RNA, 21 nt, Human
ucacagaggacuccagaagcc

SEQ ID NO: 1373633 - RNA, 22 nt, Human
ucaccugggcuggagugcagug

SEQ ID NO: 1373634 - RNA, 18 nt, Human
ucacugcaaucuccgccu

SEQ ID NO: 1373635 - RNA, 19 nt, Human
ucacugcaaucuccgccuc

SEQ ID NO: 1373636 - RNA, 23 nt, Human
ucacugcaaucuccgccucccag

SEQ ID NO: 1373637 - RNA, 24 nt, Human
ucacugcaaucuccgccucccaga

SEQ ID NO: 1373638 - RNA, 18 nt, Human
ucagccucccaaagugcu

SEQ ID NO: 1373639 - RNA, 20 nt, Human
ucagccucccaaagugcugg

SEQ ID NO: 1373640 - RNA, 18 nt, Human
ucagccucccaaguagcu

SEQ ID NO: 1373641 - RNA, 20 nt, Human
ucagccucccaaguagcugg

SEQ ID NO: 1373642 - RNA, 18 nt, Human
uccaccaccacuugcauc

SEQ ID NO: 1373643 - RNA, 21 nt, Human
uccacccaccucagccuccca

SEQ ID NO: 1373644 - RNA, 19 nt, Human
uccaugaacaccgcuccau

SEQ ID NO: 1373645 - RNA, 23 nt, Human
ucccaaagugcugggguuacagg

SEQ ID NO: 1373646 - RNA, 24 nt, Human
ucccaaguagcugggauuacaggc

SEQ ID NO: 1373647 - RNA, 21 nt, Human
ucccagauucaagcgauucuc

SEQ ID NO: 1373648 - RNA, 24 nt, Human
ucccagauucaagcgauucuccug

SEQ ID NO: 1373649 - RNA, 18 nt, Human
uccgcgcccgggagcgac

SEQ ID NO: 1373650 - RNA, 24 nt, Human
ucgcucugucaccugggcuggagu

SEQ ID NO: 1373651 - RNA, 26 nt, Human
ucuccugccucagccucccaaguagc

SEQ ID NO: 1373652 - RNA, 18 nt, Human
ucucgcucugucaccugg

SEQ ID NO: 1373653 - RNA, 19 nt, Human
ucucgcucugucaccuggg

SEQ ID NO: 1373654 - RNA, 22 nt, Human
ucucgcucugucaccugggcug

SEQ ID NO: 1373655 - RNA, 23 nt, Human
ucucgcucugucaccugggcugg

SEQ ID NO: 1373656 - RNA, 24 nt, Human
ucucgcucugucaccugggcugga

SEQ ID NO: 1373657 - RNA, 22 nt, Human
ugagauggagucucgcucuguc

SEQ ID NO: 1373658 - RNA, 24 nt, Human
ugauccacccaccucagccuccca

SEQ ID NO: 1373659 - RNA, 24 nt, Human
ugccucagccucccaaguagcugg

SEQ ID NO: 1373660 - RNA, 23 nt, Human
uggagugcaguggcgggaucucg

SEQ ID NO: 1373661 - RNA, 24 nt, Human
uggagugcaguggcgggaucucgg

SEQ ID NO: 1373662 - RNA, 24 nt, Human
uggccaagcuggucucgagcuccu

SEQ ID NO: 1373663 - RNA, 21 nt, Human
ugggauuacaggcgcccgcca

SEQ ID NO: 1373664 - RNA, 22 nt, Human
ugggauuacaggcgcccgccac

SEQ ID NO: 1373665 - RNA, 24 nt, Human
ugggauuacaggcgcccgccacca

SEQ ID NO: 1373666 - RNA, 22 nt, Human
ugggguuacaggugugagccgc

SEQ ID NO: 1373667 - RNA, 23 nt, Human
ugggguuacaggugugagccgcc

SEQ ID NO: 1373668 - RNA, 21 nt, Human
ugucaccugggcuggagugca

SEQ ID NO: 1373669 - RNA, 24 nt, Human
uuaguagagacgggggcucaccau

SEQ ID NO: 1373670 - RNA, 21 nt, Human
uucaagcgauucuccugccuc

SEQ ID NO: 1373671 - RNA, 23 nt, Human
uucaagcgauucuccugccucag

SEQ ID NO: 1373672 - RNA, 24 nt, Human
uucaagcgauucuccugccucagc

SEQ ID NO: 1373673 - RNA, 20 nt, Human
uuccguguccgcgcccggga

SEQ ID NO: 1373674 - RNA, 20 nt, Human
uuuuuguauuuuaguagaga

SEQ ID NO: 1373675 - RNA, 20 nt, Human
uuuuuuguauuuuaguagag

SEQ ID NO: 1373676 - RNA, 24 nt, Human
uuuuuuuguauuuuaguagagacg

SEQ ID NO: 1373677 - RNA, 25 nt, Human
uuuuuuuuuuuugagauggagucuc

SEQ ID NO: 1373678 - RNA, 21 nt, Human
aacaaauuuaauucuguucca

SEQ ID NO: 1373679 - RNA, 23 nt, Human
aacauagagagcaguggaagaga

SEQ ID NO: 1373680 - RNA, 22 nt, Human
aagagacaggagagauaugcca

SEQ ID NO: 1373681 - RNA, 22 nt, Human
aagaucccaagacuucuaccaa

SEQ ID NO: 1373682 - RNA, 18 nt, Human
aaguguaauacaggcagg

SEQ ID NO: 1373683 - RNA, 22 nt, Human
agaaagucuucauuuaaaacau

SEQ ID NO: 1373684 - RNA, 22 nt, Human
agacaggagagauaugccagaa

SEQ ID NO: 1373685 - RNA, 21 nt, Human
agagccuugucuccucuccuc

SEQ ID NO: 1373686 - RNA, 22 nt, Human
agagccuugucuccucuccucc

SEQ ID NO: 1373687 - RNA, 23 nt, Human
agcaguggaagagacaggagaga

SEQ ID NO: 1373688 - RNA, 21 nt, Human
aggaaggaggcaacaacagga

SEQ ID NO: 1373689 - RNA, 24 nt, Human
auguggcccuguagagagcuggaa

SEQ ID NO: 1373690 - RNA, 22 nt, Human
auuuaaaacauuccucccaucc

SEQ ID NO: 1373691 - RNA, 19 nt, Human
caggagagauaugccagaa

SEQ ID NO: 1373692 - RNA, 21 nt, Human
ccagagccuugucuccucucc

SEQ ID NO: 1373693 - RNA, 21 nt, Human
ccagccccaaagaagaggaag

SEQ ID NO: 1373694 - RNA, 18 nt, Human
cccauggcaagaucccaa

SEQ ID NO: 1373695 - RNA, 21 nt, Human
cccauggcaagaucccaagac

SEQ ID NO: 1373696 - RNA, 18 nt, Human
cuccucuccuccacuccc

SEQ ID NO: 1373697 - RNA, 18 nt, Human
cuggaccggcuguccaga

SEQ ID NO: 1373698 - RNA, 22 nt, Human
cuguuccagccccaaagaagag

SEQ ID NO: 1373699 - RNA, 25 nt, Human
gagagcaguggaagagaccgguacc

SEQ ID NO: 1373700 - RNA, 19 nt, Human
gagcaguggaagagacagg

SEQ ID NO: 1373701 - RNA, 21 nt, Human
gagcaguggaagagacaggag

SEQ ID NO: 1373702 - RNA, 18 nt, Human
gaggacagaggagagaga

SEQ ID NO: 1373703 - RNA, 23 nt, Human
gccuugucuccucuccuccacuc

SEQ ID NO: 1373704 - RNA, 20 nt, Human
gggaaagagaaagucuucau

SEQ ID NO: 1373705 - RNA, 19 nt, Human
ggggacucugucccauggc

SEQ ID NO: 1373706 - RNA, 20 nt, Human
uagagagcuggaacaugaug

SEQ ID NO: 1373707 - RNA, 28 nt, Human
uaggaaggaggcaacaacaggaaccuug

SEQ ID NO: 1373708 - RNA, 24 nt, Human
uccagccccaaagaagaggaagga

SEQ ID NO: 1373709 - RNA, 22 nt, Human
uccucuccuccacucccuguug

SEQ ID NO: 1373710 - RNA, 24 nt, Human
uccuuuagcaauaaauacugaacu

SEQ ID NO: 1373711 - RNA, 23 nt, Human
ugaggacagaggagagagaagag

SEQ ID NO: 1373712 - RNA, 19 nt, Human
ugaggcuuaggaaggaggc

SEQ ID NO: 1373713 - RNA, 19 nt, Human
ugccagaagaguauguggc

SEQ ID NO: 1373714 - RNA, 22 nt, Human
uggaagagacaggagagauaug

SEQ ID NO: 1373715 - RNA, 21 nt, Human
ugucuccucuccuccacuccc

SEQ ID NO: 1373716 - RNA, 20 nt, Human
uuaaaacauagagagcagug

SEQ ID NO: 1373717 - RNA, 20 nt, Human
aacacggugaaaccucgucu

SEQ ID NO: 1373718 - RNA, 21 nt, Human
aacacggugaaaccucgucuc

SEQ ID NO: 1373719 - RNA, 24 nt, Human
aauggcaugaaccugggaggugga

SEQ ID NO: 1373720 - RNA, 19 nt, Human
acaaaaacaaaaauccaga

SEQ ID NO: 1373721 - RNA, 18 nt, Human
acacggugaaaccucguc

SEQ ID NO: 1373722 - RNA, 19 nt, Human
acacggugaaaccucgucu

SEQ ID NO: 1373723 - RNA, 24 nt, Human
accucgucucuacuaaaaauacaa

SEQ ID NO: 1373724 - RNA, 26 nt, Human
acgcaggcagaucacgaggccgggag

SEQ ID NO: 1373725 - RNA, 21 nt, Human
acugcacucccgccugggcgg

SEQ ID NO: 1373726 - RNA, 24 nt, Human
acugcacucccgccugggcggcag

SEQ ID NO: 1373727 - RNA, 26 nt, Human
acugcacucccgccugggcggcagag

SEQ ID NO: 1373728 - RNA, 21 nt, Human
acuuaaguucuacugccuguu

SEQ ID NO: 1373729 - RNA, 18 nt, Human
agcacuuugggaggccga

SEQ ID NO: 1373730 - RNA, 23 nt, Human
agccaggcgugguggcaggugcc

SEQ ID NO: 1373731 - RNA, 19 nt, Human
aggcagaucacgaggccgg

SEQ ID NO: 1373732 - RNA, 21 nt, Human
aggcaggagaauggcaugaac

SEQ ID NO: 1373733 - RNA, 22 nt, Human
aggcaggagaauggcaugaacc

SEQ ID NO: 1373734 - RNA, 24 nt, Human
aggcaggagaauggcaugaaccug

SEQ ID NO: 1373735 - RNA, 19 nt, Human
aggcugaggcaggagaaug

SEQ ID NO: 1373736 - RNA, 19 nt, Human
aucaugccacugccacugg

SEQ ID NO: 1373737 - RNA, 21 nt, Human
caagacuccgucucaaaaaaa

SEQ ID NO: 1373738 - RNA, 24 nt, Human
cacaucuauaaucccagcacuuug

SEQ ID NO: 1373739 - RNA, 23 nt, Human
cacugcacucccgccugggcggc

SEQ ID NO: 1373740 - RNA, 24 nt, Human
cacugcacucccgccugggcggca

SEQ ID NO: 1373741 - RNA, 19 nt, Human
cagagcaagacuccgucuc

SEQ ID NO: 1373742 - RNA, 23 nt, Human
cagagcaagacuccgucucaaaa

SEQ ID NO: 1373743 - RNA, 18 nt, Human
cagcacuuugggaggccg

SEQ ID NO: 1373744 - RNA, 24 nt, Human
cagcacuuugggaggccgacgcag

SEQ ID NO: 1373745 - RNA, 24 nt, Human
cagcuacucgggaggcugaggcag

SEQ ID NO: 1373746 - RNA, 19 nt, Human
caguaggccgggcgcggug

SEQ ID NO: 1373747 - RNA, 23 nt, Human
caucuauaaucccagcacuuugg

SEQ ID NO: 1373748 - RNA, 20 nt, Human
ccacugcacucccgccuggg

SEQ ID NO: 1373749 - RNA, 21 nt, Human
ccacugcacucccgccugggc

SEQ ID NO: 1373750 - RNA, 24 nt, Human
ccacugcacucccgccugggcggc

SEQ ID NO: 1373751 - RNA, 18 nt, Human
cccccgcaaugaaggauc

SEQ ID NO: 1373752 - RNA, 21 nt, Human
ccuggcuaacacggugaaacc

SEQ ID NO: 1373753 - RNA, 24 nt, Human
ccuggcuaacacggugaaaccucg

SEQ ID NO: 1373754 - RNA, 22 nt, Human
ccugggcggcagagcaagacuc

SEQ ID NO: 1373755 - RNA, 21 nt, Human
ccuguagucccagcuacucgg

SEQ ID NO: 1373756 - RNA, 24 nt, Human
cgccugggcggcagagcaagacuc

SEQ ID NO: 1373757 - RNA, 18 nt, Human
cggacucccggcucgcgu

SEQ ID NO: 1373758 - RNA, 21 nt, Human
cuauaaucccagcacuuuggg

SEQ ID NO: 1373759 - RNA, 18 nt, Human
cucaaaaaaaaaaaaaaa

SEQ ID NO: 1373760 - RNA, 24 nt, Human
cucacaucuauaaucccagcacuu

SEQ ID NO: 1373761 - RNA, 19 nt, Human
cuccgucucaaaaaaaaaa

SEQ ID NO: 1373762 - RNA, 18 nt, Human
cuggcuaacacggugaaa

SEQ ID NO: 1373763 - RNA, 19 nt, Human
gaaaccucgucucuacuaa

SEQ ID NO: 1373764 - RNA, 18 nt, Human
gauaucaugccacugcca

SEQ ID NO: 1373765 - RNA, 24 nt, Human
gccacugcacucccgccugggcgg

SEQ ID NO: 1373766 - RNA, 19 nt, Human
gcuaacacggugaaaccuc

SEQ ID NO: 1373767 - RNA, 21 nt, Human
ggagcuuauagugagcugaua

SEQ ID NO: 1373768 - RNA, 21 nt, Human
ggagguggagcuuauagugag

SEQ ID NO: 1373769 - RNA, 24 nt, Human
ggcagagcaagacuccgucucaaa

SEQ ID NO: 1373770 - RNA, 21 nt, Human
ggcucacaucuauaaucccag

SEQ ID NO: 1373771 - RNA, 24 nt, Human
gggcgcgguggcucacaucuauaa

SEQ ID NO: 1373772 - RNA, 24 nt, Human
guaggccgggcgcgguggcucaca

SEQ ID NO: 1373773 - RNA, 20 nt, Human
guggagcuuauagugagcug

SEQ ID NO: 1373774 - RNA, 24 nt, Human
uaacacggugaaaccucgucucua

SEQ ID NO: 1373775 - RNA, 19 nt, Human
uaauuuuccuccacauccc

SEQ ID NO: 1373776 - RNA, 20 nt, Human
ucaaaaaaaaaaaaaaaaaa

SEQ ID NO: 1373777 - RNA, 21 nt, Human
ucaaaaaaaaaaaaaaaaaaa

SEQ ID NO: 1373778 - RNA, 24 nt, Human
ucaaaaaaaaaaaaaaaaaaagau

SEQ ID NO: 1373779 - RNA, 24 nt, Human
ucacgaggccgggagauugagacc

SEQ ID NO: 1373780 - RNA, 23 nt, Human
uccgucucaaaaaaaaaaaaaaa

SEQ ID NO: 1373781 - RNA, 22 nt, Human
uccuccacaucccccgcaauga

SEQ ID NO: 1373782 - RNA, 22 nt, Human
ucucuacuaaaaauacaaaaaa

SEQ ID NO: 1373783 - RNA, 24 nt, Human
ugagaccauccuggcuaacacggu

SEQ ID NO: 1373784 - RNA, 24 nt, Human
ugaggcaggagaauggcaugaacc

SEQ ID NO: 1373785 - RNA, 24 nt, Human
ugaggcaggagaauggcaugaacc

SEQ ID NO: 1373786 - RNA, 24 nt, Human
ugauacaacaaaguuaagggaaga

SEQ ID NO: 1373787 - RNA, 23 nt, Human
ugccuguagucccagcuacucgg

SEQ ID NO: 1373788 - RNA, 24 nt, Human
ugccuguagucccagcuacucggg

SEQ ID NO: 1373789 - RNA, 22 nt, Human
uggcucacaucuauaaucccag

SEQ ID NO: 1373790 - RNA, 24 nt, Human
uggcucacaucuauaaucccagca

SEQ ID NO: 1373791 - RNA, 24 nt, Human
ugggaggccgacgcaggcagauca

SEQ ID NO: 1373792 - RNA, 24 nt, Human
ugggagguggagcuuauagugagc

SEQ ID NO: 1373793 - RNA, 24 nt, Human
ugguggcaggugccuguaguccca

SEQ ID NO: 1373794 - RNA, 21 nt, Human
uuacaaaaacaaaaauccaga

SEQ ID NO: 1373795 - RNA, 22 nt, Human
aaaaaaaaaaaaaaggaaagaa

SEQ ID NO: 1373796 - RNA, 19 nt, Human
aaaaaaucagaacaaaacu

SEQ ID NO: 1373797 - RNA, 25 nt, Human
aaaagaaaaucagguuuuaacaaaa

SEQ ID NO: 1373798 - RNA, 18 nt, Human
aaacuaauuuauuauagu

SEQ ID NO: 1373799 - RNA, 21 nt, Human
aacacagacuggaagccuaga

SEQ ID NO: 1373800 - RNA, 24 nt, Human
aaccaaacacagacuggaagccua

SEQ ID NO: 1373801 - RNA, 22 nt, Human
aauguggauacuacaaaagaaa

SEQ ID NO: 1373802 - RNA, 23 nt, Human
acaaaaaaaaaaaaaaggaaaga

SEQ ID NO: 1373803 - RNA, 22 nt, Human
acaacaaaaaaaaaaaaaagga

SEQ ID NO: 1373804 - RNA, 23 nt, Human
acugcaacuagcaagaacuauaa

SEQ ID NO: 1373805 - RNA, 21 nt, Human
agacuaacacgggucuaagca

SEQ ID NO: 1373806 - RNA, 20 nt, Human
agcacaacaacuaaaauaaa

SEQ ID NO: 1373807 - RNA, 19 nt, Human
aguacuauuuaaaauacag

SEQ ID NO: 1373808 - RNA, 21 nt, Human
auaaaaaccaaacacagacug

SEQ ID NO: 1373809 - RNA, 18 nt, Human
auaaagcaaaaacgucuu

SEQ ID NO: 1373810 - RNA, 21 nt, Human
auauacauauuucuauugccu

SEQ ID NO: 1373811 - RNA, 23 nt, Human
auauauucauauauauauacaca

SEQ ID NO: 1373812 - RNA, 22 nt, Human
auaugaaccacccucccacugc

SEQ ID NO: 1373813 - RNA, 24 nt, Human
auucauuguuuaaaggcaaacauu

SEQ ID NO: 1373814 - RNA, 22 nt, Human
caacaaaaaaaaaaaaaaggaa

SEQ ID NO: 1373815 - RNA, 22 nt, Human
caauauauucauauauauauac

SEQ ID NO: 1373816 - RNA, 23 nt, Human
cagaaggggucaugcuacuggua

SEQ ID NO: 1373817 - RNA, 23 nt, Human
caguacuauuuaaaauacagaaa

SEQ ID NO: 1373818 - RNA, 19 nt, Human
ccguccucuccacucugcc

SEQ ID NO: 1373819 - RNA, 19 nt, Human
cuacugguaaaagcacagg

SEQ ID NO: 1373820 - RNA, 23 nt, Human
cuagcaaagucaaaaauacaaaa

SEQ ID NO: 1373821 - RNA, 18 nt, Human
cugccacaaacuagcaaa

SEQ ID NO: 1373822 - RNA, 24 nt, Human
gcaugggauacaacaauacaccuu

SEQ ID NO: 1373823 - RNA, 22 nt, Human
gcuuuuuggaggacaaaguacu

SEQ ID NO: 1373824 - RNA, 22 nt, Human
ggaggacaaaguacuuucuacg

SEQ ID NO: 1373825 - RNA, 19 nt, Human
gucuacuaaagauaaaaag

SEQ ID NO: 1373826 - RNA, 19 nt, Human
uaaaaagcaacaugcuaca

SEQ ID NO: 1373827 - RNA, 25 nt, Human
uaacuauuacaacaaaaaaaaaaaa

SEQ ID NO: 1373828 - RNA, 19 nt, Human
uacacacgcauugugugug

SEQ ID NO: 1373829 - RNA, 19 nt, Human
uaccagaagcaaaauaucc

SEQ ID NO: 1373830 - RNA, 25 nt, Human
uagaacagcauuauugaguuuagca

SEQ ID NO: 1373831 - RNA, 21 nt, Human
uagcaagaacuauaaaugaua

SEQ ID NO: 1373832 - RNA, 25 nt, Human
uagcacaacaacuaaaauaaaauaa

SEQ ID NO: 1373833 - RNA, 28 nt, Human
uauaauaacaaucauaauaaugauaaga

SEQ ID NO: 1373834 - RNA, 21 nt, Human
uauacacacgcauugugugug

SEQ ID NO: 1373835 - RNA, 22 nt, Human
uauacacacgcauuguguguga

SEQ ID NO: 1373836 - RNA, 21 nt, Human
uauauacacacgcauugugug

SEQ ID NO: 1373837 - RNA, 18 nt, Human
uauauauauacacacgca

SEQ ID NO: 1373838 - RNA, 24 nt, Human
uauaugaauauauugguguauaua

SEQ ID NO: 1373839 - RNA, 19 nt, Human
ucaacuaacaucauucaac

SEQ ID NO: 1373840 - RNA, 18 nt, Human
ucuucaacuuguucacuu

SEQ ID NO: 1373841 - RNA, 20 nt, Human
ugaaauauccacccguccuc

SEQ ID NO: 1373842 - RNA, 20 nt, Human
ugauaagaauaaaaaccaaa

SEQ ID NO: 1373843 - RNA, 25 nt, Human
ugauaagaauaaaaaccaaacacag

SEQ ID NO: 1373844 - RNA, 24 nt, Human
ugauuuauuuugguaguuguuuuu

SEQ ID NO: 1373845 - RNA, 18 nt, Human
ugccacacagauauagag

SEQ ID NO: 1373846 - RNA, 25 nt, Human
ugccacacagauauagagacuaaca

SEQ ID NO: 1373847 - RNA, 19 nt, Human
ugcgauacgcuauacuaaa

SEQ ID NO: 1373848 - RNA, 23 nt, Human
uggauacuacaaaagaaaaucag

SEQ ID NO: 1373849 - RNA, 20 nt, Human
uggaugugaaaaauauuacc

SEQ ID NO: 1373850 - RNA, 22 nt, Human
ugugugaguauauaugaauaua

SEQ ID NO: 1373851 - RNA, 18 nt, Human
uguucuaaaaaaucagaa

SEQ ID NO: 1373852 - RNA, 24 nt, Human
uguucuaaaaaaucagaacaaaac

SEQ ID NO: 1373853 - RNA, 18 nt, Human
uuaaaggcaaacauucaa

SEQ ID NO: 1373854 - RNA, 23 nt, Human
uucauauauauauacacacgcau

SEQ ID NO: 1373855 - RNA, 20 nt, Human
uucuaagccucuuuaacuau

SEQ ID NO: 1373856 - RNA, 30 nt, Human; identical to SEQ ID NO: 794184

SEQ ID NO: 1373857 - RNA, 25 nt, Human
uuuuauggaugugaaaaauauuacc

SEQ ID NO: 1373858 - RNA, 19 nt, Human
aagccccaggccugcucag

SEQ ID NO: 1373859 - RNA, 19 nt, Human
agccccaggccugcucagc

SEQ ID NO: 1373860 - RNA, 24 nt, Human
aggacggcccaucuaugccuguag

SEQ ID NO: 1373861 - RNA, 19 nt, Human
aggagcuuccucccgggaa

SEQ ID NO: 1373862 - RNA, 19 nt, Human
aggcccccgacccaugacc

SEQ ID NO: 1373863 - RNA, 22 nt, Human
aggcccccgacccaugaccugc

SEQ ID NO: 1373864 - RNA, 27 nt, Human
aggcccccgacccaugaccugcccagg

SEQ ID NO: 1373865 - RNA, 19 nt, Human
agggacauagaaccaagcc

SEQ ID NO: 1373866 - RNA, 24 nt, Human
auuggagagggucgcagcgaggag

SEQ ID NO: 1373867 - RNA, 19 nt, Human
caagccccaggccugcuca

SEQ ID NO: 1373868 - RNA, 23 nt, Human
caagggaaacaaaaggacggccc

SEQ ID NO: 1373869 - RNA, 24 nt, Human
cagcagggaauggcccucucuggc

SEQ ID NO: 1373870 - RNA, 19 nt, Human
cccaugaccugcccagugu

SEQ ID NO: 1373871 - RNA, 20 nt, Human
cccccgacccaugaccugcc

SEQ ID NO: 1373872 - RNA, 20 nt, Human
ccuggcacggggaggccccc

SEQ ID NO: 1373873 - RNA, 21 nt, Human
ccuggcacggggaggcccccg

SEQ ID NO: 1373874 - RNA, 18 nt, Human
cgggaagaugagguagca

SEQ ID NO: 1373875 - RNA, 25 nt, Human
cucucuggccucucuggggagagau

SEQ ID NO: 1373876 - RNA, 19 nt, Human
cucuggccucucuggcccc

SEQ ID NO: 1373877 - RNA, 23 nt, Human
gcaccugggacugccucagaggc

SEQ ID NO: 1373878 - RNA, 24 nt, Human
gcagcagggaauggcccucucugg

SEQ ID NO: 1373879 - RNA, 18 nt, Human
ggaaacaaaaggacggcc

SEQ ID NO: 1373880 - RNA, 21 nt, Human
guguguggccgcagagucucc

SEQ ID NO: 1373881 - RNA, 19 nt, Human
uaacaagggaaacaaaagg

SEQ ID NO: 1373882 - RNA, 20 nt, Human
uaacaagggaaacaaaagga

SEQ ID NO: 1373883 - RNA, 23 nt, Human
uagaaccaagccccaggccugcu

SEQ ID NO: 1373884 - RNA, 27 nt, Human
ucagggcagcagggaauggcccucucu

SEQ ID NO: 1373885 - RNA, 19 nt, Human
ucccuggcacggggaggcc

SEQ ID NO: 1373886 - RNA, 23 nt, Human
ucccuggcacggggaggcccccg

SEQ ID NO: 1373887 - RNA, 23 nt, Human
ucuguguguuuaaggcgugcuug

SEQ ID NO: 1373888 - RNA, 19 nt, Human
ugaaggagcuuccucccgg

SEQ ID NO: 1373889 - RNA, 21 nt, Human
ugaccugcccagugucauguc

SEQ ID NO: 1373890 - RNA, 20 nt, Human
ugccucagaggcccaggcag

SEQ ID NO: 1373891 - RNA, 21 nt, Human
ugccucagaggcccaggcagu

SEQ ID NO: 1373892 - RNA, 21 nt, Human
ugccuguagcccaggcguagg

SEQ ID NO: 1373893 - RNA, 18 nt, Human
ugcuugcauguugugugu

SEQ ID NO: 1373894 - RNA, 28 nt, Human
uguguggccgcagagucucccuccccuc

SEQ ID NO: 1373895 - RNA, 18 nt, Human
uguugggccggugugaga

SEQ ID NO: 1373896 - RNA, 19 nt, Human
aaaaaaagccaaucacaaa

SEQ ID NO: 1373897 - RNA, 28 nt, Human
aaaaaaccaaagcaaacaacuggaaaau

SEQ ID NO: 1373898 - RNA, 19 nt, Human
aaaaauguggagaaacugg

SEQ ID NO: 1373899 - RNA, 21 nt, Human
aaaauaacaagcguuggcaaa

SEQ ID NO: 1373900 - RNA, 18 nt, Human
aaacaaacuaccccacac

SEQ ID NO: 1373901 - RNA, 24 nt, Human
aaaccaaagcaaacaacuggaaaa

SEQ ID NO: 1373902 - RNA, 19 nt, Human
aaagaacugcaaugcaaca

SEQ ID NO: 1373903 - RNA, 21 nt, Human
aaaugcuuuuuaacaaggauu

SEQ ID NO: 1373904 - RNA, 23 nt, Human
aacaacaaacaaccaauuaaaau

SEQ ID NO: 1373905 - RNA, 20 nt, Human
aacacaauuaaaaaaaugaa

SEQ ID NO: 1373906 - RNA, 19 nt, Human
acaccauuaauuagggaaa

SEQ ID NO: 1373907 - RNA, 23 nt, Human
acaccauuaauuagggaaaugaa

SEQ ID NO: 1373908 - RNA, 23 nt, Human
acuacaucaaacuuuaaaacucc

SEQ ID NO: 1373909 - RNA, 18 nt, Human
acuagcaaaaaaccaaag

SEQ ID NO: 1373910 - RNA, 18 nt, Human
agaaacaaacuaccccac

SEQ ID NO: 1373911 - RNA, 18 nt, Human
agaauaaaacaggggaaa

SEQ ID NO: 1373912 - RNA, 23 nt, Human
agacagaaaguagaaugggggac

SEQ ID NO: 1373913 - RNA, 21 nt, Human
agacagaaaguagaaugguga

SEQ ID NO: 1373914 - RNA, 19 nt, Human
agagugagaaggcaaccua

SEQ ID NO: 1373915 - RNA, 23 nt, Human
agcaaacaacuggaaaauaacaa

SEQ ID NO: 1373916 - RNA, 20 nt, Human
aggcaacaaagccaaaauag

SEQ ID NO: 1373917 - RNA, 26 nt, Human
agggaaaaaaagccaaucacaaaaaa

SEQ ID NO: 1373918 - RNA, 22 nt, Human
agugagaaggcaaccuauagaa

SEQ ID NO: 1373919 - RNA, 23 nt, Human
auaugcaaaagaauaaaguugga

SEQ ID NO: 1373920 - RNA, 22 nt, Human
augaugccaagggaaaaaaagc

SEQ ID NO: 1373921 - RNA, 23 nt, Human
caaaaaaccaaagcaaacaacug

SEQ ID NO: 1373922 - RNA, 26 nt, Human
caaaacuuauuccaaaaauacgguaa

SEQ ID NO: 1373923 - RNA, 23 nt, Human
caaaagcacaggcaacaaagcca

SEQ ID NO: 1373924 - RNA, 20 nt, Human
caauagccagcauuauucac

SEQ ID NO: 1373925 - RNA, 20 nt, Human
caaugcaacaacaacaaaca

SEQ ID NO: 1373926 - RNA, 23 nt, Human
caaugcaacaacaacaaacaacc

SEQ ID NO: 1373927 - RNA, 24 nt, Human
cacaggcaacaaagccaaaauaga

SEQ ID NO: 1373928 - RNA, 22 nt, Human
caccaugggugauccugaggac

SEQ ID NO: 1373929 - RNA, 18 nt, Human
cagaaaguagaaugguga

SEQ ID NO: 1373930 - RNA, 23 nt, Human
caugacaggcccuggugugugau

SEQ ID NO: 1373931 - RNA, 20 nt, Human
cauuggauuuggcaaugauu

SEQ ID NO: 1373932 - RNA, 21 nt, Human
ccaaaaggaggaagcaacaca

SEQ ID NO: 1373933 - RNA, 18 nt, Human
cccccaucccuccacccc

SEQ ID NO: 1373934 - RNA, 19 nt, Human
cccucccccaucccuccac

SEQ ID NO: 1373935 - RNA, 23 nt, Human
cuccuaaugcuaucccuccccca

SEQ ID NO: 1373936 - RNA, 18 nt, Human
cugcaaugcaacaacaac

SEQ ID NO: 1373937 - RNA, 18 nt, Human
cuggguauauacccaaaa

SEQ ID NO: 1373938 - RNA, 20 nt, Human
gaaaaaaugcuaaacaccau

SEQ ID NO: 1373939 - RNA, 25 nt, Human
gaauagagagcucagaaacaaacuu

SEQ ID NO: 1373940 - RNA, 18 nt, Human
gacaggcccuggugugug

SEQ ID NO: 1373941 - RNA, 21 nt, Human
gcacaggcaacaaagccaaaa

SEQ ID NO: 1373942 - RNA, 22 nt, Human
ggaaaaaaagccaaucacaaaa

SEQ ID NO: 1373943 - RNA, 18 nt, Human
gggcggagggggaggugg

SEQ ID NO: 1373944 - RNA, 23 nt, Human
ggugauccugaggacaugaugcc

SEQ ID NO: 1373945 - RNA, 18 nt, Human
guuggcaaaaauguggag

SEQ ID NO: 1373946 - RNA, 21 nt, Human
uaaaacucucagaauaaaaca

SEQ ID NO: 1373947 - RNA, 24 nt, Human
uaaaaugaauuaaagaccuaaaug

SEQ ID NO: 1373948 - RNA, 18 nt, Human
uaaacuggacuacaucaa

SEQ ID NO: 1373949 - RNA, 21 nt, Human
uacaaauggucuaacaaacac

SEQ ID NO: 1373950 - RNA, 22 nt, Human
uacccaaaagaauugaaagcag

SEQ ID NO: 1373951 - RNA, 21 nt, Human
uaccuagaguagucaaauuca

SEQ ID NO: 1373952 - RNA, 22 nt, Human
uaccuagaguagucaaauucau

SEQ ID NO: 1373953 - RNA, 22 nt, Human
uacuagcaaaaaaccaaagcaa

SEQ ID NO: 1373954 - RNA, 23 nt, Human
uacuagcaaaaaaccaaagcaaa

SEQ ID NO: 1373955 - RNA, 19 nt, Human
uagcagcauuauucacaau

SEQ ID NO: 1373956 - RNA, 21 nt, Human
uagccaaaaggaggaagcaac

SEQ ID NO: 1373957 - RNA, 26 nt, Human
uaggauggcuacuagcaaaaaaccaa

SEQ ID NO: 1373958 - RNA, 23 nt, Human
uaguugacacuacuaaacugugc

SEQ ID NO: 1373959 - RNA, 22 nt, Human
uauacaaauggucuaacaaaca

SEQ ID NO: 1373960 - RNA, 23 nt, Human
uauacaaauggucuaacaaacac

SEQ ID NO: 1373961 - RNA, 25 nt, Human
uaugcaaaagaauaaaguuggaccc

SEQ ID NO: 1373962 - RNA, 26 nt, Human
ucaaaaggaagaaaauucugacacaa

SEQ ID NO: 1373963 - RNA, 18 nt, Human
ucaacagagugagaaggc

SEQ ID NO: 1373964 - RNA, 19 nt, Human
uccaaggaagauauacaaa

SEQ ID NO: 1373965 - RNA, 22 nt, Human
uccauaugcaaaagaauaaagu

SEQ ID NO: 1373966 - RNA, 18 nt, Human
ucccccaucccuccaccc

SEQ ID NO: 1373967 - RNA, 23 nt, Human
ucccccaucccuccaccccauga

SEQ ID NO: 1373968 - RNA, 25 nt, Human
uccuaaugcuaucccucccccaucc

SEQ ID NO: 1373969 - RNA, 27 nt, Human
ucuaacaaacaccugaaaaaaugcuaa

SEQ ID NO: 1373970 - RNA, 23 nt, Human
ucuccuaaugcuaucccuccccc

SEQ ID NO: 1373971 - RNA, 19 nt, Human
ucuggguauauacccaaaa

SEQ ID NO: 1373972 - RNA, 21 nt, Human
ugaaaaaaugcuaaacaccau

SEQ ID NO: 1373973 - RNA, 22 nt, Human
ugaaaccaaaagcacaggcaac

SEQ ID NO: 1373974 - RNA, 24 nt, Human
ugaaaccaaaagcacaggcaacaa

SEQ ID NO: 1373975 - RNA, 21 nt, Human
ugacacaugguacaccauggg

SEQ ID NO: 1373976 - RNA, 23 nt, Human
ugagaccauccaguggggaaagu

SEQ ID NO: 1373977 - RNA, 22 nt, Human
ugaugccaagggaaaaaaagcc

SEQ ID NO: 1373978 - RNA, 24 nt, Human
ugaugccaagggaaaaaaagccaa

SEQ ID NO: 1373979 - RNA, 25 nt, Human
ugcaacaacaacaaacaaccaauua

SEQ ID NO: 1373980 - RNA, 20 nt, Human
ugcaauagcuaaagcuauaa

SEQ ID NO: 1373981 - RNA, 21 nt, Human
ugccaagggaaaaaaagccaa

SEQ ID NO: 1373982 - RNA, 18 nt, Human
uggagaaacuggaacucu

SEQ ID NO: 1373983 - RNA, 18 nt, Human
uguauauuuuaacacaau

SEQ ID NO: 1373984 - RNA, 19 nt, Human
uguauauuuuaacacaauu

SEQ ID NO: 1373985 - RNA, 22 nt, Human
ugugcauuauugauagaaaagu

SEQ ID NO: 1373986 - RNA, 22 nt, Human
uguggagaaacuggaacucuug

SEQ ID NO: 1373987 - RNA, 20 nt, Human
uuaaagaccuaaaugcaaua

SEQ ID NO: 1373988 - RNA, 21 nt, Human
uuaauggguauaagguuucac

SEQ ID NO: 1373989 - RNA, 26 nt, Human
uuacguauaucuccuaaugcuauccc

SEQ ID NO: 1373990 - RNA, 18 nt, Human
uucaaccuucaaaaggaa

SEQ ID NO: 1373991 - RNA, 23 nt, Human
uuucaacaaauagugcugggaag

SEQ ID NO: 1373992 - RNA, 22 nt, Human
aucuauccaaagcccaaccucu

SEQ ID NO: 1373993 - RNA, 18 nt, Human
ccucaaucuaacaugcua

SEQ ID NO: 1373994 - RNA, 19 nt, Human
ucuuuuuuaugaaacaagg

SEQ ID NO: 1373995 - RNA, 18 nt, Human
ugaccggacccaggaguc

SEQ ID NO: 1373996 - RNA, 27 nt, Human
ugucuaucuauccaaagcccaaccucu

SEQ ID NO: 1373997 - RNA, 19 nt, Human
auauacaugaaaagauuug

SEQ ID NO: 1373998 - RNA, 19 nt, Human
ccagcagcgggacccgcag

SEQ ID NO: 1373999 - RNA, 23 nt, Human
ccgcaguagggguaaugcuccag

SEQ ID NO: 1374000 - RNA, 20 nt, Human
cgcugccagcagcgggaccc

SEQ ID NO: 1374001 - RNA, 21 nt, Human
gcaguagggguaaugcuccag

SEQ ID NO: 1374002 - RNA, 21 nt, Human
aaaaacaaaguuuugcccaca

SEQ ID NO: 1374003 - RNA, 21 nt, Human
aaaaccaaaguacucugcugg

SEQ ID NO: 1374004 - RNA, 25 nt, Human
aaacaaaaacaaaguuuugcccaca

SEQ ID NO: 1374005 - RNA, 25 nt, Human
aaagaaaaucacaguuuaaacagaa

SEQ ID NO: 1374006 - RNA, 26 nt, Human
aacaaaaacaaaguuuugcccacaga

SEQ ID NO: 1374007 - RNA, 19 nt, Human
aacuauauaacucagaagu

SEQ ID NO: 1374008 - RNA, 21 nt, Human
aacuauauaacucagaaguca

SEQ ID NO: 1374009 - RNA, 24 nt, Human
aauaaggcaagucacaccuuuuag

SEQ ID NO: 1374010 - RNA, 27 nt, Human
agaaagcuuucauaguuaacuuaccaa

SEQ ID NO: 1374011 - RNA, 25 nt, Human
agaaggaaaagaaccaacauucuaa

SEQ ID NO: 1374012 - RNA, 23 nt, Human
agaugcaaccuuuucucucccuu

SEQ ID NO: 1374013 - RNA, 19 nt, Human
aggacaugaagaaaaccaa

SEQ ID NO: 1374014 - RNA, 19 nt, Human
aggcagaaggaaaagaacc

SEQ ID NO: 1374015 - RNA, 23 nt, Human
aggcauccugcagaugcaaccuu

SEQ ID NO: 1374016 - RNA, 22 nt, Human
aggggggcuggggacgguaaaa

SEQ ID NO: 1374017 - RNA, 20 nt, Human
aguacagcccucaacaaaac

SEQ ID NO: 1374018 - RNA, 21 nt, Human
agugaaucuuuccugucucuu

SEQ ID NO: 1374019 - RNA, 19 nt, Human
aucacaggaaucccuggcu

SEQ ID NO: 1374020 - RNA, 20 nt, Human
augaagcacccaaagacuca

SEQ ID NO: 1374021 - RNA, 21 nt, Human
auggcacuccuaccuucuuuu

SEQ ID NO: 1374022 - RNA, 24 nt, Human
auuuaaaaacauaucugauaaccc

SEQ ID NO: 1374023 - RNA, 22 nt, Human
caaaaugaaaauuccaaggcca

SEQ ID NO: 1374024 - RNA, 23 nt, Human
caaccuuuucucucccuucuuuc

SEQ ID NO: 1374025 - RNA, 25 nt, Human
caagucuucaccccuucaguucaua

SEQ ID NO: 1374026 - RNA, 19 nt, Human
cacacacacgaaagcaaaa

SEQ ID NO: 1374027 - RNA, 19 nt, Human
caccaacacaauaaagaaa

SEQ ID NO: 1374028 - RNA, 25 nt, Human
cacuucaauuucacagggacacuuc

SEQ ID NO: 1374029 - RNA, 22 nt, Human
cagaaggaaaagaaccaacauu

SEQ ID NO: 1374030 - RNA, 18 nt, Human
caggcgcucgcggcaggg

SEQ ID NO: 1374031 - RNA, 21 nt, Human
cagggauauauauacgaccau

SEQ ID NO: 1374032 - RNA, 24 nt, Human
caguauucugcaggggaagcacca

SEQ ID NO: 1374033 - RNA, 18 nt, Human
ccaaaaaggcagaaggaa

SEQ ID NO: 1374034 - RNA, 19 nt, Human
ccaagcaaauaacagcagc

SEQ ID NO: 1374035 - RNA, 24 nt, Human
ccaguaucauuucaauaaggcaag

SEQ ID NO: 1374036 - RNA, 21 nt, Human
cccggagccggggucgcgagc

SEQ ID NO: 1374037 - RNA, 21 nt, Human
ccgccgggcgacucuuuccug

SEQ ID NO: 1374038 - RNA, 23 nt, Human
ccuuguuuuguugcccucuccaa

SEQ ID NO: 1374039 - RNA, 20 nt, Human
ccuuuucucucccuucuuuc

SEQ ID NO: 1374040 - RNA, 24 nt, Human
cgaaagcaaaauuuaaaaaccaaa

SEQ ID NO: 1374041 - RNA, 21 nt, Human
cgccgggcgacucuuuccugc

SEQ ID NO: 1374042 - RNA, 20 nt, Human
cuauuuuuggugaacaugcu

SEQ ID NO: 1374043 - RNA, 20 nt, Human
cucacaaaaccaacagaugg

SEQ ID NO: 1374044 - RNA, 21 nt, Human
cucacaaaaccaacagaugga

SEQ ID NO: 1374045 - RNA, 24 nt, Human
cucagaagucaauaaacaguugaa

SEQ ID NO: 1374046 - RNA, 21 nt, Human
cucucagcucacaaaaccaac

SEQ ID NO: 1374047 - RNA, 19 nt, Human
cucucccuucuuucucuuu

SEQ ID NO: 1374048 - RNA, 21 nt, Human
cuguggguuaaauuguuacau

SEQ ID NO: 1374049 - RNA, 18 nt, Human
cuuccauguguccagaga

SEQ ID NO: 1374050 - RNA, 20 nt, Human
cuugugcggcaauccugccg

SEQ ID NO: 1374051 - RNA, 22 nt, Human
cuuuucucucccuucuuucucu

SEQ ID NO: 1374052 - RNA, 21 nt, Human
gacucuuuccugccccugagg

SEQ ID NO: 1374053 - RNA, 20 nt, Human
gacuguguaguuaucaaggc

SEQ ID NO: 1374054 - RNA, 25 nt, Human
gcaaaacaaaaacaaaguuuugccc

SEQ ID NO: 1374055 - RNA, 24 nt, Human
gcagaggagagagguaagcccaga

SEQ ID NO: 1374056 - RNA, 18 nt, Human
gcagaggcccggagccgg

SEQ ID NO: 1374057 - RNA, 22 nt, Human
ggauauauauacgaccaucaua

SEQ ID NO: 1374058 - RNA, 20 nt, Human
ggucggcagaggcccggagc

SEQ ID NO: 1374059 - RNA, 24 nt, Human
guaaaacacugcucagacuuucag

SEQ ID NO: 1374060 - RNA, 24 nt, Human
guagaauucuccacauucauaaaa

SEQ ID NO: 1374061 - RNA, 20 nt, Human
gugaaucuuuccugucucuu

SEQ ID NO: 1374062 - RNA, 18 nt, Human
uaaaaacauaucugauaa

SEQ ID NO: 1374063 - RNA, 20 nt, Human
uaaaaaguacagcccucaac

SEQ ID NO: 1374064 - RNA, 25 nt, Human
uaaaacgaacccauaggguucaaac

SEQ ID NO: 1374065 - RNA, 22 nt, Human
uaaauagcggcuuacaaugaaa

SEQ ID NO: 1374066 - RNA, 25 nt, Human
uaaccaagcaaauaacagcagcuac

SEQ ID NO: 1374067 - RNA, 21 nt, Human
uaacucagaagucaauaaaca

SEQ ID NO: 1374068 - RNA, 22 nt, Human
uaacucagaagucaauaaacag

SEQ ID NO: 1374069 - RNA, 20 nt, Human
uaacuuaccaaaaacauaac

SEQ ID NO: 1374070 - RNA, 26 nt, Human
uaacuuaccaaaaacauaacgcuugc

SEQ ID NO: 1374071 - RNA, 20 nt, Human
uaacuuacugaauuuucccc

SEQ ID NO: 1374072 - RNA, 20 nt, Human
uaacuuacugaauuuucccc

SEQ ID NO: 1374073 - RNA, 24 nt, Human
uacaaaguaauuuuuuuuccugug

SEQ ID NO: 1374074 - RNA, 24 nt, Human
uacugugcaaaacaaaaacaaagu

SEQ ID NO: 1374075 - RNA, 23 nt, Human
uaggaaaucaugaagcacccaaa

SEQ ID NO: 1374076 - RNA, 21 nt, Human
uaggaccucauaugaccauga

SEQ ID NO: 1374077 - RNA, 24 nt, Human
uagugaaggauuccuuuaaguugu

SEQ ID NO: 1374078 - RNA, 26 nt, Human
uaguuaacuuaccaaaaacauaacgc

SEQ ID NO: 1374079 - RNA, 21 nt, Human
ucaggacuuccauuacauucu

SEQ ID NO: 1374080 - RNA, 18 nt, Human
ucaugaagcacccaaaga

SEQ ID NO: 1374081 - RNA, 22 nt, Human
uccuguuggucugaauauccug

SEQ ID NO: 1374082 - RNA, 20 nt, Human
ucucacauucuuuaauuucu

SEQ ID NO: 1374083 - RNA, 21 nt, Human
ugaaaagcauacauuugccua

SEQ ID NO: 1374084 - RNA, 18 nt, Human
ugaaaauuccaaggccac

SEQ ID NO: 1374085 - RNA, 20 nt, Human
ugaaagaacuaugcacgaug

SEQ ID NO: 1374086 - RNA, 24 nt, Human
ugaagaaaaccaaaguacucugcu

SEQ ID NO: 1374087 - RNA, 22 nt, Human
ugaagcacccaaagacucagga

SEQ ID NO: 1374088 - RNA, 18 nt, Human
ugacaauuucaguagcac

SEQ ID NO: 1374089 - RNA, 19 nt, Human
ugcucagacuuucagcagc

SEQ ID NO: 1374090 - RNA, 24 nt, Human
ugcucucagcucacaaaaccaaca

SEQ ID NO: 1374091 - RNA, 23 nt, Human
uggaaggaaaagcaagugaacau

SEQ ID NO: 1374092 - RNA, 18 nt, Human
uggcuguaaacagcagca

SEQ ID NO: 1374093 - RNA, 24 nt, Human
ugggaggggggcuggggacgguaa

SEQ ID NO: 1374094 - RNA, 24 nt, Human
uggucuaacaguuuugcauugugg

SEQ ID NO: 1374095 - RNA, 22 nt, Human
uguaucacaggaaucccuggcu

SEQ ID NO: 1374096 - RNA, 18 nt, Human
ugugcaaaacaaaaacaa

SEQ ID NO: 1374097 - RNA, 24 nt, Human
ugugggaauuuaaauagcggcuua

SEQ ID NO: 1374098 - RNA, 24 nt, Human
uguguagaaaauucccugaucaaa

SEQ ID NO: 1374099 - RNA, 19 nt, Human
uguuucuuucauuauguuu

SEQ ID NO: 1374100 - RNA, 24 nt, Human
uuaaaaacauaucugauaacccca

SEQ ID NO: 1374101 - RNA, 23 nt, Human
uuaaagacacacacacgaaagca

SEQ ID NO: 1374102 - RNA, 21 nt, Human
uucaaacaagcauacaaagua

SEQ ID NO: 1374103 - RNA, 19 nt, Human
uucaagugaaucuuuccug

SEQ ID NO: 1374104 - RNA, 21 nt, Human
uucaauguagaauucuccaca

SEQ ID NO: 1374105 - RNA, 23 nt, Human
uucaccccuucaguucauaucgc

SEQ ID NO: 1374106 - RNA, 23 nt, Human
uucauuaggaccucauaugacca

SEQ ID NO: 1374107 - RNA, 20 nt, Human
uucccaaaaaggcagaagga

SEQ ID NO: 1374108 - RNA, 20 nt, Human
uucucuuaaguccuacagag

SEQ ID NO: 1374109 - RNA, 18 nt, Human
uucuguuucaauguagaa

SEQ ID NO: 1374110 - RNA, 20 nt, Human
uugaaagaaaaaucaaucau

SEQ ID NO: 1374111 - RNA, 25 nt, Human
uugguguuuauuuugacauucucuu

SEQ ID NO: 1374112 - RNA, 21 nt, Human
uugugggaauuuaaauagcgg

SEQ ID NO: 1374113 - RNA, 28 nt, Human
uuuaaaaacauaucugauaaccccauua

SEQ ID NO: 1374114 - RNA, 20 nt, Human
uuucaagaaacccuuucuug

SEQ ID NO: 1374115 - RNA, 20 nt, Human
uuuccugucucuuucccaaa

SEQ ID NO: 1374116 - RNA, 21 nt, Human
uuugcacaucuucaucccagu

SEQ ID NO: 1374117 - RNA, 18 nt, Human
aaaaacugaggaaaacuc

SEQ ID NO: 1374118 - RNA, 20 nt, Human
aaaacacagacauaggcagc

SEQ ID NO: 1374119 - RNA, 20 nt, Human
aaagacauagcaugugcaaa

SEQ ID NO: 1374120 - RNA, 28 nt, Human
aaaguacugggauuaauuauaggcauga

SEQ ID NO: 1374121 - RNA, 19 nt, Human
aacagccaucaggaucauc

SEQ ID NO: 1374122 - RNA, 23 nt, Human
aacccaccgagaggaaggaacaa

SEQ ID NO: 1374123 - RNA, 22 nt, Human
aagaaacuccgaacacaucuga

SEQ ID NO: 1374124 - RNA, 24 nt, Human
aagugauccacccaccuuggccuc

SEQ ID NO: 1374125 - RNA, 21 nt, Human
aauuauaggcaugagccacug

SEQ ID NO: 1374126 - RNA, 21 nt, Human
aauuauaggcaugagccacug

SEQ ID NO: 1374127 - RNA, 24 nt, Human
aauuauaggcaugagccacugugc

SEQ ID NO: 1374128 - RNA, 19 nt, Human
acaaaucucauucuacaac

SEQ ID NO: 1374129 - RNA, 21 nt, Human
acaucagaaggagcaaacucc

SEQ ID NO: 1374130 - RNA, 24 nt, Human
acuccuggcuucaagugauccacc

SEQ ID NO: 1374131 - RNA, 23 nt, Human
acugcgaaggucugcagcuucac

SEQ ID NO: 1374132 - RNA, 19 nt, Human
agaaggaagaaacuccgaa

SEQ ID NO: 1374133 - RNA, 18 nt, Human
agcaggaugugggugggg

SEQ ID NO: 1374134 - RNA, 23 nt, Human
agccggcaguggcaacccgcucg

SEQ ID NO: 1374135 - RNA, 21 nt, Human
aggaagaaaaacugaggaaaa

SEQ ID NO: 1374136 - RNA, 22 nt, Human
aggcaugagccacugugcccca

SEQ ID NO: 1374137 - RNA, 19 nt, Human
agguagagguguccucagg

SEQ ID NO: 1374138 - RNA, 24 nt, Human
agguagucagcacucugucaaaac

SEQ ID NO: 1374139 - RNA, 19 nt, Human
agguguccucagggaauag

SEQ ID NO: 1374140 - RNA, 19 nt, Human
agugauccacccaccuugg

SEQ ID NO: 1374141 - RNA, 21 nt, Human
auaaaaacacagacauaggca

SEQ ID NO: 1374142 - RNA, 24 nt, Human
auggaauuucgccauguuggccag

SEQ ID NO: 1374143 - RNA, 22 nt, Human
caaaagacauagcaugugcaaa

SEQ ID NO: 1374144 - RNA, 28 nt, Human
caaaguacugggauuaauuauaggcaug

SEQ ID NO: 1374145 - RNA, 20 nt, Human
caagauaugcuguaauuuac

SEQ ID NO: 1374146 - RNA, 24 nt, Human
cacagacauaggcagccuuguaua

SEQ ID NO: 1374147 - RNA, 19 nt, Human
caccagaaggaagaaacuc

SEQ ID NO: 1374148 - RNA, 22 nt, Human
caccagaaggaagaaacuccga

SEQ ID NO: 1374149 - RNA, 22 nt, Human
cacccaccuuggccucccaaag

SEQ ID NO: 1374150 - RNA, 23 nt, Human
cacccaccuuggccucccaaagu

SEQ ID NO: 1374151 - RNA, 23 nt, Human
cacucugucaaaacggaccaauc

SEQ ID NO: 1374152 - RNA, 24 nt, Human
cacucugucaaaacggaccaauca

SEQ ID NO: 1374153 - RNA, 24 nt, Human
cacugggccuguugcuguaucauc

SEQ ID NO: 1374154 - RNA, 22 nt, Human
cagaaggagcaaacuccggaca

SEQ ID NO: 1374155 - RNA, 21 nt, Human
cagagaacagggugguuucga

SEQ ID NO: 1374156 - RNA, 23 nt, Human
cagcacucugucaaaacggacca

SEQ ID NO: 1374157 - RNA, 20 nt, Human
cagccaucaggaucauccca

SEQ ID NO: 1374158 - RNA, 21 nt, Human
cagugagaccaagaacccacc

SEQ ID NO: 1374159 - RNA, 19 nt, Human
caguucauucagagaggga

SEQ ID NO: 1374160 - RNA, 24 nt, Human
cauguuggccaggcuggucuugaa

SEQ ID NO: 1374161 - RNA, 26 nt, Human
ccaaaguacugggauuaauuauaggc

SEQ ID NO: 1374162 - RNA, 28 nt, Human
ccaaaguacugggauuaauuauaggcau

SEQ ID NO: 1374163 - RNA, 19 nt, Human
ccagaagaccuacaugaug

SEQ ID NO: 1374164 - RNA, 21 nt, Human
ccaggcaugcauaaugcugag

SEQ ID NO: 1374165 - RNA, 19 nt, Human
ccauguuggccaggcuggu

SEQ ID NO: 1374166 - RNA, 21 nt, Human
ccauguuggccaggcuggucu

SEQ ID NO: 1374167 - RNA, 21 nt, Human
ccauguuggccaggcuggucu

SEQ ID NO: 1374168 - RNA, 27 nt, Human
cccaccagaaggaagaaacuccgaaca

SEQ ID NO: 1374169 - RNA, 19 nt, Human
cccugacucaggaaagcuc

SEQ ID NO: 1374170 - RNA, 20 nt, Human
ccugaagccagcgagaccac

SEQ ID NO: 1374171 - RNA, 18 nt, Human
ccuggcuucaagugaucc

SEQ ID NO: 1374172 - RNA, 24 nt, Human
ccuggcuucaagugauccacccac

SEQ ID NO: 1374173 - RNA, 18 nt, Human
cgaacccaccagaaggaa

SEQ ID NO: 1374174 - RNA, 26 nt, Human
cgaacccaccgagaggaaggaacaac

SEQ ID NO: 1374175 - RNA, 19 nt, Human
cgagaccacgaacccaccg

SEQ ID NO: 1374176 - RNA, 24 nt, Human
cgccauguuggccaggcuggucuu

SEQ ID NO: 1374177 - RNA, 27 nt, Human
cgccauguuggccaggcuggucuugaa

SEQ ID NO: 1374178 - RNA, 20 nt, Human
cuaucauagcugagauugcu

SEQ ID NO: 1374179 - RNA, 24 nt, Human
cuccaaagccuuaggaagccugga

SEQ ID NO: 1374180 - RNA, 27 nt, Human
cuccuggcuucaagugauccacccacc

SEQ ID NO: 1374181 - RNA, 22 nt, Human
cucucuguaaaauggaccaauc

SEQ ID NO: 1374182 - RNA, 19 nt, Human
cucuuugcaauaaaucuug

SEQ ID NO: 1374183 - RNA, 20 nt, Human
cugaagccagcgagaccacg

SEQ ID NO: 1374184 - RNA, 25 nt, Human
cugaagccagcgagaccacgaaccc

SEQ ID NO: 1374185 - RNA, 18 nt, Human
cugagccagcgagaccac

SEQ ID NO: 1374186 - RNA, 24 nt, Human
cugagccagcgagaccacgaaccc

SEQ ID NO: 1374187 - RNA, 19 nt, Human
cuguaaaauggaccaauca

SEQ ID NO: 1374188 - RNA, 21 nt, Human
cuugcaaacaaauccucucca

SEQ ID NO: 1374189 - RNA, 24 nt, Human
cuugcaaacaaauccucuccacuu

SEQ ID NO: 1374190 - RNA, 23 nt, Human
cuugcugcugcucacucuuuggg

SEQ ID NO: 1374191 - RNA, 23 nt, Human
cuuuaugagcuguaacacucacc

SEQ ID NO: 1374192 - RNA, 18 nt, Human
cuuuguucuuuugcucuu

SEQ ID NO: 1374193 - RNA, 23 nt, Human
gaccacgaacccaccagaaggaa

SEQ ID NO: 1374194 - RNA, 20 nt, Human
gagaccacgaacccaccaga

SEQ ID NO: 1374195 - RNA, 26 nt, Human
gagccacugugccccacaaucauucg

SEQ ID NO: 1374196 - RNA, 20 nt, Human
gagcuguaacacucaccgca

SEQ ID NO: 1374197 - RNA, 21 nt, Human
gaggaagaaaaacugaggaaa

SEQ ID NO: 1374198 - RNA, 20 nt, Human
gcagaauuuuccacaucgca

SEQ ID NO: 1374199 - RNA, 19 nt, Human
gcaugagccacugugcccc

SEQ ID NO: 1374200 - RNA, 22 nt, Human
ggaauuucgccauguuggccag

SEQ ID NO: 1374201 - RNA, 19 nt, Human
ggcuggucuugaacuccug

SEQ ID NO: 1374202 - RNA, 19 nt, Human
gggaagggugggggagaaa

SEQ ID NO: 1374203 - RNA, 22 nt, Human
gucaaaacggaccaaucagcuc

SEQ ID NO: 1374204 - RNA, 21 nt, Human
gucaccuuccacacuguggaa

SEQ ID NO: 1374205 - RNA, 24 nt, Human
gugauccacccaccuuggccuccc

SEQ ID NO: 1374206 - RNA, 22 nt, Human
gugucgggccccucacugggcc

SEQ ID NO: 1374207 - RNA, 18 nt, Human
uaaaaacacagacauagg

SEQ ID NO: 1374208 - RNA, 19 nt, Human
uaaaaacacagacauaggc

SEQ ID NO: 1374209 - RNA, 23 nt, Human
uaaaaacacagacauaggcagcc

SEQ ID NO: 1374210 - RNA, 27 nt, Human
uaaaaacacagacauaggcuggagacc

SEQ ID NO: 1374211 - RNA, 20 nt, Human
uaaaacagaccaauuggcuc

SEQ ID NO: 1374212 - RNA, 19 nt, Human
uaaaauggaccaaucagca

SEQ ID NO: 1374213 - RNA, 24 nt, Human
uaaaauggaccaaucagcaggaug

SEQ ID NO: 1374214 - RNA, 24 nt, Human
uacuagagauggaauuucgccaug

SEQ ID NO: 1374215 - RNA, 22 nt, Human
uagagauggaauuucgccaugu

SEQ ID NO: 1374216 - RNA, 23 nt, Human
uagcaugugcaaaggcccugacu

SEQ ID NO: 1374217 - RNA, 19 nt, Human
ucaagugauccacccaccu

SEQ ID NO: 1374218 - RNA, 18 nt, Human
ucacaugcagugagagac

SEQ ID NO: 1374219 - RNA, 21 nt, Human
ucacugggccuguugcuguau

SEQ ID NO: 1374220 - RNA, 19 nt, Human
ucagggaauagcccagcag

SEQ ID NO: 1374221 - RNA, 23 nt, Human
ucauucgugaacaacaaaauuuu

SEQ ID NO: 1374222 - RNA, 18 nt, Human
ucccaaaguacugggauu

SEQ ID NO: 1374223 - RNA, 28 nt, Human
ucccaaaguacugggauuaauuauaggc

SEQ ID NO: 1374224 - RNA, 20 nt, Human
uccgaacacaucugaacauc

SEQ ID NO: 1374225 - RNA, 22 nt, Human
uccggacacaccgccuuuaaga

SEQ ID NO: 1374226 - RNA, 22 nt, Human
ucgccauguuggccaggcuggu

SEQ ID NO: 1374227 - RNA, 24 nt, Human
ucgccauguuggccaggcuggucu

SEQ ID NO: 1374228 - RNA, 25 nt, Human
ucgggccccucacugggccuguugc

SEQ ID NO: 1374229 - RNA, 21 nt, Human
ucuugaacuccuggcuucaag

SEQ ID NO: 1374230 - RNA, 20 nt, Human
ucuuugcacuaaugcucuuc

SEQ ID NO: 1374231 - RNA, 21 nt, Human
ugaagaggggguacuugacca

SEQ ID NO: 1374232 - RNA, 19 nt, Human
ugacucaggaaagcuccaa

SEQ ID NO: 1374233 - RNA, 18 nt, Human
ugacugcugacgugaugg

SEQ ID NO: 1374234 - RNA, 18 nt, Human
ugagaccaagaacccacc

SEQ ID NO: 1374235 - RNA, 19 nt, Human
ugagaccaagaacccacca

SEQ ID NO: 1374236 - RNA, 23 nt, Human
ugagcuguaacacucaccgcaaa

SEQ ID NO: 1374237 - RNA, 24 nt, Human
ugauccacccaccuuggccuccca

SEQ ID NO: 1374238 - RNA, 30 nt, Human
ugccucccucaccucuucggcgucuuccaa

SEQ ID NO: 1374239 - RNA, 24 nt, Human
uggaauuucgccauguuggccagg

SEQ ID NO: 1374240 - RNA, 24 nt, Human
uggccaggcuggucuugaacuccu

SEQ ID NO: 1374241 - RNA, 22 nt, Human
uggcuucaagugauccacccac

SEQ ID NO: 1374242 - RNA, 19 nt, Human
ugggaaggaaccaggcaug

SEQ ID NO: 1374243 - RNA, 26 nt, Human
ugggaaggaaccaggcaugcauaaug

SEQ ID NO: 1374244 - RNA, 28 nt, Human
ugggauuaauuauaggcaugagccacug

SEQ ID NO: 1374245 - RNA, 20 nt, Human
ugucuuugcacuaaugcucu

SEQ ID NO: 1374246 - RNA, 18 nt, Human
uuacuagagauggaauuu

SEQ ID NO: 1374247 - RNA, 24 nt, Human
uuacuagagauggaauuucgccau

SEQ ID NO: 1374248 - RNA, 20 nt, Human
uucaagugauccacccaccu

SEQ ID NO: 1374249 - RNA, 24 nt, Human
uucaagugauccacccaccuuggc

SEQ ID NO: 1374250 - RNA, 18 nt, Human
uucgagcaggguuuggca

SEQ ID NO: 1374251 - RNA, 25 nt, Human
uucuuuugcucuuugcaauaaaucu

SEQ ID NO: 1374252 - RNA, 25 nt, Human
uugaagucagugagaccaagaaccc

SEQ ID NO: 1374253 - RNA, 21 nt, Human
uugcugcugcucacucuuugg

SEQ ID NO: 1374254 - RNA, 24 nt, Human
uuucgccauguuggccaggcuggu

SEQ ID NO: 1374255 - RNA, 20 nt, Human
uuuucagcuuuaaguucauc

SEQ ID NO: 1374256 - RNA, 24 nt, Human
uuuuuacuagagauggaauuucgc

SEQ ID NO: 1374257 - RNA, 20 nt, Human
aaaaaaagagcaaacaccau

SEQ ID NO: 1374258 - RNA, 20 nt, Human
aaacucggggcaagccggug

SEQ ID NO: 1374259 - RNA, 20 nt, Human
aaagaccugcauccucuucc

SEQ ID NO: 1374260 - RNA, 20 nt, Human
aaagcucccucagccccauu

SEQ ID NO: 1374261 - RNA, 20 nt, Human
aaaggaaccagggcaaagcu

SEQ ID NO: 1374262 - RNA, 23 nt, Human
aacagagccaccacagaaaacag

SEQ ID NO: 1374263 - RNA, 24 nt, Human
aacagcuucugggugucccuggca

SEQ ID NO: 1374264 - RNA, 20 nt, Human
aaccaaaggcaguguacggg

SEQ ID NO: 1374265 - RNA, 21 nt, Human
aaccacgcaguccccaucuug

SEQ ID NO: 1374266 - RNA, 18 nt, Human
aaccccucagucacuuca

SEQ ID NO: 1374267 - RNA, 21 nt, Human
aaccugcauauccaccucccu

SEQ ID NO: 1374268 - RNA, 19 nt, Human
aacgcagcacuccacuacc

SEQ ID NO: 1374269 - RNA, 23 nt, Human
aacuacagauaucguaugagucc

SEQ ID NO: 1374270 - RNA, 18 nt, Human
aagaggccuggcccacag

SEQ ID NO: 1374271 - RNA, 20 nt, Human
aagcaauggccccauuuccc

SEQ ID NO: 1374272 - RNA, 23 nt, Human
aagccugcagcccccauuuccag

SEQ ID NO: 1374273 - RNA, 27 nt, Human
aaggaaacacaauuuccgagggaaugg

SEQ ID NO: 1374274 - RNA, 20 nt, Human
aauccaucucucucgcaggc

SEQ ID NO: 1374275 - RNA, 21 nt, Human
aauguucuucccaaccuaccc

SEQ ID NO: 1374276 - RNA, 18 nt, Human
acacagcuccccgccccu

SEQ ID NO: 1374277 - RNA, 24 nt, Human
acacaguucaggugaagaaagacc

SEQ ID NO: 1374278 - RNA, 19 nt, Human
acaguaccccaucuccccu

SEQ ID NO: 1374279 - RNA, 20 nt, Human
accauuauuaccacaacuuc

SEQ ID NO: 1374280 - RNA, 19 nt, Human
accccaucuccccugaaca

SEQ ID NO: 1374281 - RNA, 22 nt, Human
acgugcacacggcucccaugcg

SEQ ID NO: 1374282 - RNA, 20 nt, Human
acuggagcccaaggacugug

SEQ ID NO: 1374283 - RNA, 21 nt, Human
agaaaacagagccaccacaga

SEQ ID NO: 1374284 - RNA, 24 nt, Human
agacagaagcaguggucgccagga

SEQ ID NO: 1374285 - RNA, 22 nt, Human
agacagaugcagugaccuggaa

SEQ ID NO: 1374286 - RNA, 24 nt, Human
agacccaaagaagcaaacugacag

SEQ ID NO: 1374287 - RNA, 19 nt, Human
agacgccagugaggccaac

SEQ ID NO: 1374288 - RNA, 19 nt, Human
agaggaagaaaacagggga

SEQ ID NO: 1374289 - RNA, 21 nt, Human
agagggugacugucauccccu

SEQ ID NO: 1374290 - RNA, 20 nt, Human
agcacaugguggagagacag

SEQ ID NO: 1374291 - RNA, 25 nt, Human
agcaccacagaaaacagagccacca

SEQ ID NO: 1374292 - RNA, 18 nt, Human
agccaugcuggcuuccuu

SEQ ID NO: 1374293 - RNA, 19 nt, Human
agccgcuggguccuagccc

SEQ ID NO: 1374294 - RNA, 19 nt, Human
agccgcuggguccuagccc

SEQ ID NO: 1374295 - RNA, 20 nt, Human
aggacccccagcccacgccc

SEQ ID NO: 1374296 - RNA, 18 nt, Human
agggguuggguugcccaa

SEQ ID NO: 1374297 - RNA, 23 nt, Human
aggugggaugagugaguguggcu

SEQ ID NO: 1374298 - RNA, 21 nt, Human
agugagggagccaggacucag

SEQ ID NO: 1374299 - RNA, 21 nt, Human
augagaacaccgaggcuuaga

SEQ ID NO: 1374300 - RNA, 25 nt, Human
caaagauaagcacaaaaggugcauc

SEQ ID NO: 1374301 - RNA, 18 nt, Human
caaagcucccucagcccc

SEQ ID NO: 1374302 - RNA, 19 nt, Human
caaagcucccucagcccca

SEQ ID NO: 1374303 - RNA, 21 nt, Human
caaccugcauauccaccuccc

SEQ ID NO: 1374304 - RNA, 22 nt, Human
caagcucagggccaagcugucc

SEQ ID NO: 1374305 - RNA, 19 nt, Human
cacaaaugagaacaccgag

SEQ ID NO: 1374306 - RNA, 18 nt, Human
cacagaaaacagagccac

SEQ ID NO: 1374307 - RNA, 22 nt, Human
cacagaaaacagagccaccaca

SEQ ID NO: 1374308 - RNA, 22 nt, Human
cacauccccaccgaaaaagccc

SEQ ID NO: 1374309 - RNA, 23 nt, Human
caccacguuccaagccacacuga

SEQ ID NO: 1374310 - RNA, 18 nt, Human
caccccccucccaccccu

SEQ ID NO: 1374311 - RNA, 25 nt, Human
caccccccucccaccccugugcagg

SEQ ID NO: 1374312 - RNA, 19 nt, Human
cacccugcccucccugcuu

SEQ ID NO: 1374313 - RNA, 21 nt, Human
cacccugcccucccugcuugc

SEQ ID NO: 1374314 - RNA, 20 nt, Human
cacggaacucacgcucacuc

SEQ ID NO: 1374315 - RNA, 18 nt, Human
cacucucucucccuucuu

SEQ ID NO: 1374316 - RNA, 20 nt, Human
cagaaaacagagggugacug

SEQ ID NO: 1374317 - RNA, 19 nt, Human
cagaagcaccccccuccca

SEQ ID NO: 1374318 - RNA, 23 nt, Human
cagaagcaccccccucccacccc

SEQ ID NO: 1374319 - RNA, 23 nt, Human
cagcaccacagaaaacagagcca

SEQ ID NO: 1374320 - RNA, 22 nt, Human
cagcacuccacuacccaggaaa

SEQ ID NO: 1374321 - RNA, 25 nt, Human
cagcacugccaauacaagaagcugc

SEQ ID NO: 1374322 - RNA, 23 nt, Human
cagcccuccagcucgccucccuc

SEQ ID NO: 1374323 - RNA, 19 nt, Human
cagcgcugucugugcuucc

SEQ ID NO: 1374324 - RNA, 24 nt, Human
cagcgcugucugugcuucccaugc

SEQ ID NO: 1374325 - RNA, 25 nt, Human
cagcuuggagaacccacacucaaug

SEQ ID NO: 1374326 - RNA, 18 nt, Human
caggacucaggcccaagg

SEQ ID NO: 1374327 - RNA, 21 nt, Human
caggcccaaggcuccugagag

SEQ ID NO: 1374328 - RNA, 19 nt, Human
cagggaagagauagcauuu

SEQ ID NO: 1374329 - RNA, 18 nt, Human
cagggccaagcuguccgc

SEQ ID NO: 1374330 - RNA, 20 nt, Human
cauacaccacguuccaagcc

SEQ ID NO: 1374331 - RNA, 20 nt, Human
cauauccaccucccuacccu

SEQ ID NO: 1374332 - RNA, 21 nt, Human
cauggaaggaaagcaaaacca

SEQ ID NO: 1374333 - RNA, 25 nt, Human
ccaaaaauccagcgcugcccucaga

SEQ ID NO: 1374334 - RNA, 20 nt, Human
ccaacucuucacucacugcc

SEQ ID NO: 1374335 - RNA, 18 nt, Human
ccaagccaggcuucccau

SEQ ID NO: 1374336 - RNA, 18 nt, Human
ccaagccaggugggauga

SEQ ID NO: 1374337 - RNA, 18 nt, Human
ccaagcuguccgccaacc

SEQ ID NO: 1374338 - RNA, 21 nt, Human
ccacacugaggccucccucca

SEQ ID NO: 1374339 - RNA, 19 nt, Human
ccacaggaggggcaagugg

SEQ ID NO: 1374340 - RNA, 19 nt, Human
ccacuggggucuaccaugu

SEQ ID NO: 1374341 - RNA, 18 nt, Human
ccaggacucaggcccaag

SEQ ID NO: 1374342 - RNA, 23 nt, Human
cccaaacucuucugucccauccc

SEQ ID NO: 1374343 - RNA, 21 nt, Human
cccacaggcucacggaaaguu

SEQ ID NO: 1374344 - RNA, 23 nt, Human
cccacuccacugccagucgucac

SEQ ID NO: 1374345 - RNA, 22 nt, Human
cccagcugcagcagagcaggag

SEQ ID NO: 1374346 - RNA, 26 nt, Human
cccaucccugcccugcucaaaaucca

SEQ ID NO: 1374347 - RNA, 21 nt, Human
cccauggacaacgaaaagccc

SEQ ID NO: 1374348 - RNA, 22 nt, Human
ccccacuccacugccagucguc

SEQ ID NO: 1374349 - RNA, 23 nt, Human
ccccacuccacugccagucguca

SEQ ID NO: 1374350 - RNA, 18 nt, Human
ccccagcccacgcccagg

SEQ ID NO: 1374351 - RNA, 21 nt, Human
cccccagcccacgcccagggc

SEQ ID NO: 1374352 - RNA, 23 nt, Human
ccccgagcgcggcuccaggaccc

SEQ ID NO: 1374353 - RNA, 22 nt, Human
ccccgccccucuucugcccuuc

SEQ ID NO: 1374354 - RNA, 23 nt, Human
ccccgccgcccccaguccgcccg

SEQ ID NO: 1374355 - RNA, 23 nt, Human
ccccggggcaggacccccagccc

SEQ ID NO: 1374356 - RNA, 19 nt, Human
ccccucccaccccugugca

SEQ ID NO: 1374357 - RNA, 21 nt, Human
ccccucuucugcccuucaucc

SEQ ID NO: 1374358 - RNA, 23 nt, Human
ccccugucguauccugacuacaa

SEQ ID NO: 1374359 - RNA, 20 nt, Human
cccggggugcgccccggggc

SEQ ID NO: 1374360 - RNA, 18 nt, Human
cccuccgcugcgcccucc

SEQ ID NO: 1374361 - RNA, 24 nt, Human
cccuccgcugcgcccuccccgagc

SEQ ID NO: 1374362 - RNA, 24 nt, Human
cccucuuccaggagucugcccuau

SEQ ID NO: 1374363 - RNA, 21 nt, Human
cccugcccucccugcuugcaa

SEQ ID NO: 1374364 - RNA, 20 nt, Human
cccugugcaggccggccuuc

SEQ ID NO: 1374365 - RNA, 18 nt, Human
cccuugugaucugcuuag

SEQ ID NO: 1374366 - RNA, 25 nt, Human
ccgaaaaagcccauggacaacgaaa

SEQ ID NO: 1374367 - RNA, 22 nt, Human
ccgauuucucuccacucuagac

SEQ ID NO: 1374368 - RNA, 19 nt, Human
ccgcaggucuggcuggaug

SEQ ID NO: 1374369 - RNA, 21 nt, Human
ccgccccucuucugcccuuca

SEQ ID NO: 1374370 - RNA, 20 nt, Human
ccgcccgcgccuccgggucc

SEQ ID NO: 1374371 - RNA, 20 nt, Human
ccgcccgcgccuccgggucc

SEQ ID NO: 1374372 - RNA, 20 nt, Human
ccgccgcccccaguccgccc

SEQ ID NO: 1374373 - RNA, 18 nt, Human
ccgcucgcccuccgcugc

SEQ ID NO: 1374374 - RNA, 22 nt, Human
ccgcucgcccuccgcugcgccc

SEQ ID NO: 1374375 - RNA, 23 nt, Human
ccgcucgcccuccgcugcgcccu

SEQ ID NO: 1374376 - RNA, 20 nt, Human
ccgcugcgcccuccccgagc

SEQ ID NO: 1374377 - RNA, 18 nt, Human
ccggggcaggacccccag

SEQ ID NO: 1374378 - RNA, 18 nt, Human
ccuagaccuccguccuuu

SEQ ID NO: 1374379 - RNA, 18 nt, Human
ccuccaagccugcagccc

SEQ ID NO: 1374380 - RNA, 19 nt, Human
ccuccaagccugcagcccc

SEQ ID NO: 1374381 - RNA, 23 nt, Human
ccuccaagccugcagcccccauu

SEQ ID NO: 1374382 - RNA, 26 nt, Human
ccucccggaagcucccgccgccgcuu

SEQ ID NO: 1374383 - RNA, 20 nt, Human
ccuccgggcagcccucgccc

SEQ ID NO: 1374384 - RNA, 21 nt, Human
ccuccggguccuaacgccgcc

SEQ ID NO: 1374385 - RNA, 23 nt, Human
ccucuccucaucccaucccuggg

SEQ ID NO: 1374386 - RNA, 18 nt, Human
ccugcagcccccauuucc

SEQ ID NO: 1374387 - RNA, 22 nt, Human
ccugcagcccccauuuccagac

SEQ ID NO: 1374388 - RNA, 18 nt, Human
ccugcccucuccucaucc

SEQ ID NO: 1374389 - RNA, 18 nt, Human
ccugcgagccgcccuccc

SEQ ID NO: 1374390 - RNA, 21 nt, Human
ccugcgagccgcccucccgga

SEQ ID NO: 1374391 - RNA, 19 nt, Human
ccugcugaagaugucucca

SEQ ID NO: 1374392 - RNA, 18 nt, Human
ccugcuggaccugacccu

SEQ ID NO: 1374393 - RNA, 19 nt, Human
ccugcuugcaaguccccug

SEQ ID NO: 1374394 - RNA, 23 nt, Human
ccugucucuuccgugcaggagga

SEQ ID NO: 1374395 - RNA, 21 nt, Human
cgaggcuuagagggguugggu

SEQ ID NO: 1374396 - RNA, 24 nt, Human
cgcaaaacuacagauaucguauga

SEQ ID NO: 1374397 - RNA, 26 nt, Human
cgccaaaaauccagcgcugcccucag

SEQ ID NO: 1374398 - RNA, 18 nt, Human
cgccaggaauggggaagc

SEQ ID NO: 1374399 - RNA, 22 nt, Human
cgcccagggcccgccccugccc

SEQ ID NO: 1374400 - RNA, 22 nt, Human
cgcccccaguccgcccgcgccu

SEQ ID NO: 1374401 - RNA, 20 nt, Human
cgccuccggguccuaacgcc

SEQ ID NO: 1374402 - RNA, 21 nt, Human
cgcucugccggagccgcuggg

SEQ ID NO: 1374403 - RNA, 21 nt, Human
cggaacucacgcucacuccga

SEQ ID NO: 1374404 - RNA, 21 nt, Human
cggcagaccaccauacaccac

SEQ ID NO: 1374405 - RNA, 22 nt, Human
cuaacucacucaucccaacucu

SEQ ID NO: 1374406 - RNA, 22 nt, Human
cucacucauguuagauaaacac

SEQ ID NO: 1374407 - RNA, 21 nt, Human
cuccaagccugcagcccccau

SEQ ID NO: 1374408 - RNA, 24 nt, Human
cuccaagccugcagcccccauuuc

SEQ ID NO: 1374409 - RNA, 21 nt, Human
cuccacuacccaggaaaugcc

SEQ ID NO: 1374410 - RNA, 21 nt, Human
cuccagcccuacgccuugacc

SEQ ID NO: 1374411 - RNA, 22 nt, Human
cuccagcccuacgccuugaccc

SEQ ID NO: 1374412 - RNA, 18 nt, Human
cucccuacccugcccccc

SEQ ID NO: 1374413 - RNA, 21 nt, Human
cucggcuccuccgggcagccc

SEQ ID NO: 1374414 - RNA, 24 nt, Human
cucuccucaucccaucccugggca

SEQ ID NO: 1374415 - RNA, 19 nt, Human
cucucucccuucuuguccc

SEQ ID NO: 1374416 - RNA, 20 nt, Human
cucucucgcaggcuuagucc

SEQ ID NO: 1374417 - RNA, 19 nt, Human
cugaccugccagggagugc

SEQ ID NO: 1374418 - RNA, 18 nt, Human
cugagccaaggcaucaac

SEQ ID NO: 1374419 - RNA, 20 nt, Human
cugcagggcauccgccaucu

SEQ ID NO: 1374420 - RNA, 20 nt, Human
cugccccacacccugccagg

SEQ ID NO: 1374421 - RNA, 21 nt, Human
cugcccugccccacacccugc

SEQ ID NO: 1374422 - RNA, 24 nt, Human
cugcucuacugauugguuaauuuu

SEQ ID NO: 1374423 - RNA, 26 nt, Human
cugcuggaccugacccugugucaugu

SEQ ID NO: 1374424 - RNA, 19 nt, Human
cugcuuaguucccaccccc

SEQ ID NO: 1374425 - RNA, 22 nt, Human
cuggaauguucuucccaaccua

SEQ ID NO: 1374426 - RNA, 19 nt, Human
cuggagcccaaggacugug

SEQ ID NO: 1374427 - RNA, 24 nt, Human
cuggccccauuaauggauucuggg

SEQ ID NO: 1374428 - RNA, 18 nt, Human
cuguagccucaccccugu

SEQ ID NO: 1374429 - RNA, 23 nt, Human
cugucaccauuuccugucgucgu

SEQ ID NO: 1374430 - RNA, 18 nt, Human
cugugccucaguuuccuc

SEQ ID NO: 1374431 - RNA, 21 nt, Human
cuucccaugcagaagcacccc

SEQ ID NO: 1374432 - RNA, 22 nt, Human
cuucugugacggaugccugagg

SEQ ID NO: 1374433 - RNA, 23 nt, Human
cuuucaaucagcagggaccgugc

SEQ ID NO: 1374434 - RNA, 21 nt, Human
gaacccaggagugagggagcc

SEQ ID NO: 1374435 - RNA, 21 nt, Human
gaagcccacgcgguucaugcu

SEQ ID NO: 1374436 - RNA, 19 nt, Human
gaagucacuggagcccaag

SEQ ID NO: 1374437 - RNA, 18 nt, Human
gacagggcagggauggcu

SEQ ID NO: 1374438 - RNA, 19 nt, Human
gacccggagcgcuguccug

SEQ ID NO: 1374439 - RNA, 19 nt, Human
gaccuccguccuuuguccc

SEQ ID NO: 1374440 - RNA, 19 nt, Human
gaccugcauccucuucccu

SEQ ID NO: 1374441 - RNA, 22 nt, Human
gaccuugucuuuaccucugugg

SEQ ID NO: 1374442 - RNA, 20 nt, Human
gagcaggggcuccaggucug

SEQ ID NO: 1374443 - RNA, 24 nt, Human
gagcucccgacgugcacacggcuc

SEQ ID NO: 1374444 - RNA, 18 nt, Human
gaggaggagagguggcgg

SEQ ID NO: 1374445 - RNA, 20 nt, Human
gaguccaguuuugugaagug

SEQ ID NO: 1374446 - RNA, 19 nt, Human
gcaaagcucccucagcccc

SEQ ID NO: 1374447 - RNA, 24 nt, Human
gcaaagcucccucagccccauuca

SEQ ID NO: 1374448 - RNA, 25 nt, Human
gcaaagcucccucagccccauucaa

SEQ ID NO: 1374449 - RNA, 21 nt, Human
gcagacccucuuccuagaccu

SEQ ID NO: 1374450 - RNA, 23 nt, Human
gcauggugugggauccugggaag

SEQ ID NO: 1374451 - RNA, 22 nt, Human
gccaggaauggggaagcaaggc

SEQ ID NO: 1374452 - RNA, 18 nt, Human
gccccacacccugccagg

SEQ ID NO: 1374453 - RNA, 20 nt, Human
gcccucuccucaucccaucc

SEQ ID NO: 1374454 - RNA, 18 nt, Human
gccuaccugaccuugucu

SEQ ID NO: 1374455 - RNA, 19 nt, Human
gcgcggcuccaggaccccg

SEQ ID NO: 1374456 - RNA, 19 nt, Human
gcucagggccaagcugucc

SEQ ID NO: 1374457 - RNA, 18 nt, Human
gcugccuuccccucaagc

SEQ ID NO: 1374458 - RNA, 21 nt, Human
gcuuaguucccaccccccuuu

SEQ ID NO: 1374459 - RNA, 18 nt, Human
ggaaagcaaaaccaggcc

SEQ ID NO: 1374460 - RNA, 20 nt, Human
ggaaaugccuuccugcccuc

SEQ ID NO: 1374461 - RNA, 23 nt, Human
ggaacaaaugugaagcccaacau

SEQ ID NO: 1374462 - RNA, 22 nt, Human
ggaagggacagggcagggaugg

SEQ ID NO: 1374463 - RNA, 19 nt, Human
ggacacaaaggaaccaggg

SEQ ID NO: 1374464 - RNA, 21 nt, Human
ggacccccagcccacgcccag

SEQ ID NO: 1374465 - RNA, 21 nt, Human
ggaggagagagcacagccugc

SEQ ID NO: 1374466 - RNA, 22 nt, Human
ggcacuguuccauuccuuugca

SEQ ID NO: 1374467 - RNA, 20 nt, Human
ggccgggcugugcuggggcc

SEQ ID NO: 1374468 - RNA, 21 nt, Human
gggaaggagaccaagccucau

SEQ ID NO: 1374469 - RNA, 21 nt, Human
gggcagggauggcuuggacca

SEQ ID NO: 1374470 - RNA, 21 nt, Human
gggcauccgccaucugcugga

SEQ ID NO: 1374471 - RNA, 19 nt, Human
gggucuaccaugugaggca

SEQ ID NO: 1374472 - RNA, 18 nt, Human
guccuagccccgccgccc

SEQ ID NO: 1374473 - RNA, 19 nt, Human
gugacagaagaggaggcug

SEQ ID NO: 1374474 - RNA, 22 nt, Human
gugcauccagcaccacagaaaa

SEQ ID NO: 1374475 - RNA, 24 nt, Human
gugcgccccggggcaggaccccca

SEQ ID NO: 1374476 - RNA, 23 nt, Human
guggagcacaugguggagagaca

SEQ ID NO: 1374477 - RNA, 22 nt, Human
guucaggugaagaaagaccugg

SEQ ID NO: 1374478 - RNA, 26 nt, Human
guuuaaggggacggguucaaagcugg

SEQ ID NO: 1374479 - RNA, 25 nt, Human
uaaaaaucaagcguauaaauacaga

SEQ ID NO: 1374480 - RNA, 19 nt, Human
uaacaaucaaucucgcccu

SEQ ID NO: 1374481 - RNA, 18 nt, Human
uaagcucaguaggggcua

SEQ ID NO: 1374482 - RNA, 21 nt, Human
uacaccacguuccaagccaca

SEQ ID NO: 1374483 - RNA, 24 nt, Human
uacaccacguuccaagccacacug

SEQ ID NO: 1374484 - RNA, 18 nt, Human
uaccaaaaaaagagcaaa

SEQ ID NO: 1374485 - RNA, 22 nt, Human
uaccaaaaaaagagcaaacacc

SEQ ID NO: 1374486 - RNA, 22 nt, Human
uaccaaaaaaagagcaaacacu

SEQ ID NO: 1374487 - RNA, 22 nt, Human
uaccccaucuccccugaacaga

SEQ ID NO: 1374488 - RNA, 19 nt, Human
uacccgugcuuucugcucu

SEQ ID NO: 1374489 - RNA, 20 nt, Human
uagagaagccagacgcaaaa

SEQ ID NO: 1374490 - RNA, 25 nt, Human
uagagaagccagacgcaaaacuaca

SEQ ID NO: 1374491 - RNA, 20 nt, Human
uaguccccuggccccauuaa

SEQ ID NO: 1374492 - RNA, 18 nt, Human
uauccaccucccuacccu

SEQ ID NO: 1374493 - RNA, 20 nt, Human
ucaaagaggccuggcccaca

SEQ ID NO: 1374494 - RNA, 19 nt, Human
ucacagagacagaagcagu

SEQ ID NO: 1374495 - RNA, 19 nt, Human
uccaccuccaggcuguagu

SEQ ID NO: 1374496 - RNA, 18 nt, Human
uccagagaccuucugcag

SEQ ID NO: 1374497 - RNA, 21 nt, Human
uccagcaccacagaaaacaga

SEQ ID NO: 1374498 - RNA, 22 nt, Human
uccaggaccccgucgacccgga

SEQ ID NO: 1374499 - RNA, 22 nt, Human
ucccaucgcugccuuccccuca

SEQ ID NO: 1374500 - RNA, 21 nt, Human
uccccugaacagaugcaguaa

SEQ ID NO: 1374501 - RNA, 19 nt, Human
ucccuacccugccccccuc

SEQ ID NO: 1374502 - RNA, 19 nt, Human
ucccuacccugccccccuc

SEQ ID NO: 1374503 - RNA, 18 nt, Human
ucccucaauggccacucc

SEQ ID NO: 1374504 - RNA, 21 nt, Human
ucccuccaagccugcagcccc

SEQ ID NO: 1374505 - RNA, 23 nt, Human
ucccugaccugagaccaagccag

SEQ ID NO: 1374506 - RNA, 20 nt, Human
ucccugcuugcaaguccccu

SEQ ID NO: 1374507 - RNA, 21 nt, Human
uccuuugucccaucgcugcua

SEQ ID NO: 1374508 - RNA, 22 nt, Human
ucuacaaggugccaaguaccag

SEQ ID NO: 1374509 - RNA, 22 nt, Human
ucucagcccuucugugccucag

SEQ ID NO: 1374510 - RNA, 22 nt, Human
ucuccacucuagacccugagaa

SEQ ID NO: 1374511 - RNA, 18 nt, Human
ucucucagccuaccugac

SEQ ID NO: 1374512 - RNA, 18 nt, Human
ucugaccugccagggagu

SEQ ID NO: 1374513 - RNA, 19 nt, Human
ucugcagacccucuuccua

SEQ ID NO: 1374514 - RNA, 21 nt, Human
ucugcagacccucuuccuaga

SEQ ID NO: 1374515 - RNA, 21 nt, Human
ucuggaauguucuucccaacc

SEQ ID NO: 1374516 - RNA, 18 nt, Human
ucugucaccauuuccugu

SEQ ID NO: 1374517 - RNA, 20 nt, Human
ucuuaagguccagcacgagg

SEQ ID NO: 1374518 - RNA, 19 nt, Human
ucuuaccgauuucucucca

SEQ ID NO: 1374519 - RNA, 20 nt, Human
ucuucccaaccuacccacuc

SEQ ID NO: 1374520 - RNA, 22 nt, Human
ucuucugcccuucauccuucuu

SEQ ID NO: 1374521 - RNA, 21 nt, Human
ucuucugucccaucccugccc

SEQ ID NO: 1374522 - RNA, 22 nt, Human
ucuugaguaauccgugggcccu

SEQ ID NO: 1374523 - RNA, 20 nt, Human
ugaagaugucuccagagacc

SEQ ID NO: 1374524 - RNA, 22 nt, Human
ugaagucacuggagcccaagga

SEQ ID NO: 1374525 - RNA, 19 nt, Human
ugaccugagaccaagccag

SEQ ID NO: 1374526 - RNA, 22 nt, Human
ugacggcagugccugcucauga

SEQ ID NO: 1374527 - RNA, 22 nt, Human
ugacugucauccccuccagucu

SEQ ID NO: 1374528 - RNA, 23 nt, Human
ugagaagcccacgcgguucaugc

SEQ ID NO: 1374529 - RNA, 21 nt, Human
ugagaccaagccaggcuuccc

SEQ ID NO: 1374530 - RNA, 22 nt, Human
ugagaccaagccaggcuuccca

SEQ ID NO: 1374531 - RNA, 25 nt, Human
ugagaccaagccaggcuucccauga

SEQ ID NO: 1374532 - RNA, 21 nt, Human
ugaggacaucauuuuagcccu

SEQ ID NO: 1374533 - RNA, 22 nt, Human
ugaggcauggugugggauccug

SEQ ID NO: 1374534 - RNA, 18 nt, Human
ugaguccaguuuugugaa

SEQ ID NO: 1374535 - RNA, 21 nt, Human
ugagugaguguggcuucugga

SEQ ID NO: 1374536 - RNA, 18 nt, Human
ugagugcaagggagaggc

SEQ ID NO: 1374537 - RNA, 19 nt, Human
ugagugcaagggagaggca

SEQ ID NO: 1374538 - RNA, 19 nt, Human
ugaguggcagcacccaccu

SEQ ID NO: 1374539 - RNA, 21 nt, Human
ugcauauccaccucccuaccc

SEQ ID NO: 1374540 - RNA, 18 nt, Human
ugccaaguaccaggacag

SEQ ID NO: 1374541 - RNA, 21 nt, Human
ugccaggcacuguuccauucc

SEQ ID NO: 1374542 - RNA, 23 nt, Human
ugccccccucuuccaggagucug

SEQ ID NO: 1374543 - RNA, 18 nt, Human
ugccccugucucuuccgu

SEQ ID NO: 1374544 - RNA, 22 nt, Human
ugcccugccccacacccugcca

SEQ ID NO: 1374545 - RNA, 19 nt, Human
ugcgaggucagcacugcca

SEQ ID NO: 1374546 - RNA, 19 nt, Human
uggaaacuucuguuaacua

SEQ ID NO: 1374547 - RNA, 20 nt, Human
uggaacccaggagugaggga

SEQ ID NO: 1374548 - RNA, 21 nt, Human
uggagaacccacacucaauga

SEQ ID NO: 1374549 - RNA, 25 nt, Human
uggagcccaaggacugugcgagguc

SEQ ID NO: 1374550 - RNA, 20 nt, Human
uggaggaaguggggacacag

SEQ ID NO: 1374551 - RNA, 21 nt, Human
uggaggaaguggggacacagg

SEQ ID NO: 1374552 - RNA, 23 nt, Human
uggaguaagcacgugguuuuccu

SEQ ID NO: 1374553 - RNA, 22 nt, Human
uggcaaggaaacacaauuuccg

SEQ ID NO: 1374554 - RNA, 18 nt, Human
uggccccauuucccuugg

SEQ ID NO: 1374555 - RNA, 22 nt, Human
uggcucucccuucccuucaucc

SEQ ID NO: 1374556 - RNA, 19 nt, Human
ugggauagacaugaggacc

SEQ ID NO: 1374557 - RNA, 18 nt, Human
ugggaugagugagugugg

SEQ ID NO: 1374558 - RNA, 21 nt, Human
ugggcacagacgccagugagg

SEQ ID NO: 1374559 - RNA, 19 nt, Human
uggggccugagccgggugg

SEQ ID NO: 1374560 - RNA, 26 nt, Human
ugucucacccugcccucccugcuugc

SEQ ID NO: 1374561 - RNA, 19 nt, Human
ugucugggaaugcagccag

SEQ ID NO: 1374562 - RNA, 22 nt, Human
ugugacggaugccugaggaacc

SEQ ID NO: 1374563 - RNA, 22 nt, Human
uuaaaaaucaagcguauaaaua

SEQ ID NO: 1374564 - RNA, 23 nt, Human
uucacaaaugagaacaccgaggc

SEQ ID NO: 1374565 - RNA, 23 nt, Human
uuccaggagucugcccuaugugg

SEQ ID NO: 1374566 - RNA, 21 nt, Human
uucccaugacgagccucacag

SEQ ID NO: 1374567 - RNA, 18 nt, Human
uucccuaggugucccucg

SEQ ID NO: 1374568 - RNA, 19 nt, Human
uuggagaacccacacucaa

SEQ ID NO: 1374569 - RNA, 18 nt, Human
uuuaaaauaauucuacca

SEQ ID NO: 1374570 - RNA, 21 nt, Human
uuucaggaagagguggguucc

SEQ ID NO: 1374571 - RNA, 20 nt, Human
aaaaugagagcuccuuucca

SEQ ID NO: 1374572 - RNA, 23 nt, Human
aaacaggaaaaguauagcaccag

SEQ ID NO: 1374573 - RNA, 24 nt, Human
aaagaaagaagaaauguaugugaa

SEQ ID NO: 1374574 - RNA, 20 nt, Human
aaccucugccuccuaggcuc

SEQ ID NO: 1374575 - RNA, 22 nt, Human
aagagggcuucucagaggaggu

SEQ ID NO: 1374576 - RNA, 24 nt, Human
aaguaacccacccgcuuuggccuc

SEQ ID NO: 1374577 - RNA, 24 nt, Human
aaguagcuaagaucacaggcacac

SEQ ID NO: 1374578 - RNA, 24 nt, Human
aaguagcugggauuacaggcgugu

SEQ ID NO: 1374579 - RNA, 25 nt, Human
aaguagcugggauuacaggcgugug

SEQ ID NO: 1374580 - RNA, 19 nt, Human
aagugcugggauuagaggc

SEQ ID NO: 1374581 - RNA, 23 nt, Human
aauccccuccuccccgccccaga

SEQ ID NO: 1374582 - RNA, 20 nt, Human
acaccaccacguccggcuaa

SEQ ID NO: 1374583 - RNA, 22 nt, Human
acagugacggaagccaagcgcc

SEQ ID NO: 1374584 - RNA, 18 nt, Human
accacuauaucaagaaau

SEQ ID NO: 1374585 - RNA, 23 nt, Human
accucagccuaccaaguagcuaa

SEQ ID NO: 1374586 - RNA, 21 nt, Human
accucucaugguugugaaggu

SEQ ID NO: 1374587 - RNA, 24 nt, Human
acuccuggccucaaguaacccacc

SEQ ID NO: 1374588 - RNA, 18 nt, Human
acucugccaucugcuggc

SEQ ID NO: 1374589 - RNA, 25 nt, Human
acucuguugcccaggcuggagugca

SEQ ID NO: 1374590 - RNA, 22 nt, Human
agacaaaaaugcagggaaaacc

SEQ ID NO: 1374591 - RNA, 19 nt, Human
agacagugacggaagccaa

SEQ ID NO: 1374592 - RNA, 22 nt, Human
agagcuccuuuccauccugccu

SEQ ID NO: 1374593 - RNA, 22 nt, Human
agaucacaggcacacaccacca

SEQ ID NO: 1374594 - RNA, 24 nt, Human
agaugucaauguacuucccaaagc

SEQ ID NO: 1374595 - RNA, 24 nt, Human
agcaguuuugggaggcugaggcgg

SEQ ID NO: 1374596 - RNA, 24 nt, Human
agccugggcaauauagugagaccu

SEQ ID NO: 1374597 - RNA, 25 nt, Human
agccugggcaauauagugagaccuc

SEQ ID NO: 1374598 - RNA, 24 nt, Human
agcuacucaaaaggcugagguggg

SEQ ID NO: 1374599 - RNA, 23 nt, Human
agcuggauguggugguaaacacc

SEQ ID NO: 1374600 - RNA, 20 nt, Human
aggcacacaccaccacgucc

SEQ ID NO: 1374601 - RNA, 18 nt, Human
aggcaggguuuugucaug

SEQ ID NO: 1374602 - RNA, 24 nt, Human
aggcgugcgccaccaagcccugcu

SEQ ID NO: 1374603 - RNA, 22 nt, Human
aggcgugugccacugccuagcu

SEQ ID NO: 1374604 - RNA, 21 nt, Human
aggcugaggcgggaagauuac

SEQ ID NO: 1374605 - RNA, 24 nt, Human
aggcugaggcgggaagauuacuug

SEQ ID NO: 1374606 - RNA, 19 nt, Human
aggcugaggugggaggauc

SEQ ID NO: 1374607 - RNA, 18 nt, Human
aggcugaucucaaacucc

SEQ ID NO: 1374608 - RNA, 25 nt, Human
aggcuggagugcaguggugcaaucu

SEQ ID NO: 1374609 - RNA, 21 nt, Human
agugcaguggugcaaucucag

SEQ ID NO: 1374610 - RNA, 21 nt, Human
agugcaguggugcaaucucag

SEQ ID NO: 1374611 - RNA, 24 nt, Human
aguuuuguauuuuuuguagagaug

SEQ ID NO: 1374612 - RNA, 21 nt, Human
auccccuccuccccgccccag

SEQ ID NO: 1374613 - RNA, 23 nt, Human
augaugggagcagagaggagaaa

SEQ ID NO: 1374614 - RNA, 22 nt, Human
augccucagcuucccaaguagc

SEQ ID NO: 1374615 - RNA, 23 nt, Human
augcgcgcgcccucgaucacccc

SEQ ID NO: 1374616 - RNA, 23 nt, Human
augggguuuugccauguugccua

SEQ ID NO: 1374617 - RNA, 24 nt, Human
augggguuuugccauguugccuag

SEQ ID NO: 1374618 - RNA, 23 nt, Human
caaccucugccuccuaggcucaa

SEQ ID NO: 1374619 - RNA, 28 nt, Human
caagcaauucucaugccucagcuuccca

SEQ ID NO: 1374620 - RNA, 18 nt, Human
cacaccaccacguccggc

SEQ ID NO: 1374621 - RNA, 20 nt, Human
caccaaagaaagaagaaaug

SEQ ID NO: 1374622 - RNA, 22 nt, Human
caccucuacaaaaaauaagaaa

SEQ ID NO: 1374623 - RNA, 23 nt, Human
caccucuacaaaaaauaagaaaa

SEQ ID NO: 1374624 - RNA, 18 nt, Human
caccucuagucucagcua

SEQ ID NO: 1374625 - RNA, 19 nt, Human
caccucuagucucagcuac

SEQ ID NO: 1374626 - RNA, 22 nt, Human
cacucuguugcccaggcuggag

SEQ ID NO: 1374627 - RNA, 18 nt, Human
cacugcaaccucugccuc

SEQ ID NO: 1374628 - RNA, 21 nt, Human
cacugcaaccucugccuccua

SEQ ID NO: 1374629 - RNA, 24 nt, Human
cagaguuucacucuguugcccagg

SEQ ID NO: 1374630 - RNA, 24 nt, Human
cagcuacucaaaaggcugaggugg

SEQ ID NO: 1374631 - RNA, 20 nt, Human
caggaguuugagagcagccu

SEQ ID NO: 1374632 - RNA, 23 nt, Human
caggguuuugucauguuggccag

SEQ ID NO: 1374633 - RNA, 24 nt, Human
caggguuuugucauguuggccagg

SEQ ID NO: 1374634 - RNA, 18 nt, Human
cauguuggccaggcugau

SEQ ID NO: 1374635 - RNA, 21 nt, Human
cauguuggccaggcugaucuc

SEQ ID NO: 1374636 - RNA, 24 nt, Human
cauguuggccaggcugaucucaaa

SEQ ID NO: 1374637 - RNA, 20 nt, Human
cauucccucaacucccgacc

SEQ ID NO: 1374638 - RNA, 26 nt, Human
cauuugcuguccuggaauacugggga

SEQ ID NO: 1374639 - RNA, 19 nt, Human
ccaaagaaagaagaaaugu

SEQ ID NO: 1374640 - RNA, 23 nt, Human
ccaagccucgaauugaagaaugg

SEQ ID NO: 1374641 - RNA, 22 nt, Human
ccaaguagcugggauuacaggc

SEQ ID NO: 1374642 - RNA, 24 nt, Human
ccaaguagcugggauuacaggcgu

SEQ ID NO: 1374643 - RNA, 23 nt, Human
ccagacagugacggaagccaagc

SEQ ID NO: 1374644 - RNA, 19 nt, Human
ccauguugccuagggugcc

SEQ ID NO: 1374645 - RNA, 20 nt, Human
ccauguugccuagggugccu

SEQ ID NO: 1374646 - RNA, 23 nt, Human
cccaaguagcugggauuacaggc

SEQ ID NO: 1374647 - RNA, 24 nt, Human
cccaaguagcugggauuacaggcg

SEQ ID NO: 1374648 - RNA, 23 nt, Human
cccaccucagccuaccaaguagc

SEQ ID NO: 1374649 - RNA, 24 nt, Human
cccacuguagccucgaaguccugg

SEQ ID NO: 1374650 - RNA, 22 nt, Human
cccgcuaagaggaagacaaaaa

SEQ ID NO: 1374651 - RNA, 23 nt, Human
cccgcuaagaggaagacaaaaau

SEQ ID NO: 1374652 - RNA, 20 nt, Human
cccucaacucccgaccuggg

SEQ ID NO: 1374653 - RNA, 21 nt, Human
cccuuggggaagaggggagga

SEQ ID NO: 1374654 - RNA, 19 nt, Human
ccgcuaagaggaagacaaa

SEQ ID NO: 1374655 - RNA, 26 nt, Human
ccucccaccucagccuaccaaguagc

SEQ ID NO: 1374656 - RNA, 25 nt, Human
ccucccauaagugcugggauuagag

SEQ ID NO: 1374657 - RNA, 19 nt, Human
ccuccccgccccagaaccu

SEQ ID NO: 1374658 - RNA, 23 nt, Human
ccuccccgccccagaaccuagac

SEQ ID NO: 1374659 - RNA, 19 nt, Human
ccucgaauugaagaauggg

SEQ ID NO: 1374660 - RNA, 24 nt, Human
ccucuagucucagcuacucaaaag

SEQ ID NO: 1374661 - RNA, 18 nt, Human
ccugccuuccccuuucuu

SEQ ID NO: 1374662 - RNA, 22 nt, Human
ccuggccucaaguaacccaccc

SEQ ID NO: 1374663 - RNA, 23 nt, Human
ccuggccucaaguaacccacccg

SEQ ID NO: 1374664 - RNA, 20 nt, Human
ccuuggggaagaggggagga

SEQ ID NO: 1374665 - RNA, 19 nt, Human
cgaauugaagaaugggcac

SEQ ID NO: 1374666 - RNA, 22 nt, Human
cgugugccacugccuagcuaau

SEQ ID NO: 1374667 - RNA, 18 nt, Human
cucaaaaggcugaggugg

SEQ ID NO: 1374668 - RNA, 19 nt, Human
cucaagcaauucucaugcc

SEQ ID NO: 1374669 - RNA, 24 nt, Human
cucacugcaaccucugccuccuag

SEQ ID NO: 1374670 - RNA, 24 nt, Human
cucagcuucccaaguagcugggau

SEQ ID NO: 1374671 - RNA, 23 nt, Human
cuccuaggcucaagcaauucuca

SEQ ID NO: 1374672 - RNA, 20 nt, Human
cucuacaaaaaauaagaaaa

SEQ ID NO: 1374673 - RNA, 20 nt, Human
cucugucacccaagcuagag

SEQ ID NO: 1374674 - RNA, 19 nt, Human
cugcaaccucugccuccua

SEQ ID NO: 1374675 - RNA, 23 nt, Human
cugcaaccucugccuccuaggcu

SEQ ID NO: 1374676 - RNA, 21 nt, Human
cuggauguggugguaaacacc

SEQ ID NO: 1374677 - RNA, 23 nt, Human
cuuucucuuuucuugggcaggcc

SEQ ID NO: 1374678 - RNA, 22 nt, Human
gaagccaagcgcccgcuaagag

SEQ ID NO: 1374679 - RNA, 19 nt, Human
gaccugggaagggggaggc

SEQ ID NO: 1374680 - RNA, 20 nt, Human
gagaaaauguaauuugagug

SEQ ID NO: 1374681 - RNA, 18 nt, Human
gagaugggguuuugccau

SEQ ID NO: 1374682 - RNA, 20 nt, Human
gagcagccugggcaauauag

SEQ ID NO: 1374683 - RNA, 28 nt, Human
gagcuuccagacagggcagagagacucu

SEQ ID NO: 1374684 - RNA, 19 nt, Human
gaggagguggccaagccuc

SEQ ID NO: 1374685 - RNA, 20 nt, Human
gaggaucaaaaacaaaaaaa

SEQ ID NO: 1374686 - RNA, 24 nt, Human
gaguugucguugcggauugucuug

SEQ ID NO: 1374687 - RNA, 18 nt, Human
gauuacaggcgugugcca

SEQ ID NO: 1374688 - RNA, 22 nt, Human
gauuacaggcgugugccacugc

SEQ ID NO: 1374689 - RNA, 22 nt, Human
gauuacuugagcucaggaguuu

SEQ ID NO: 1374690 - RNA, 24 nt, Human
gauuacuugagcucaggaguuuga

SEQ ID NO: 1374691 - RNA, 22 nt, Human
gcaaccucugccuccuaggcuc

SEQ ID NO: 1374692 - RNA, 20 nt, Human
gcagggaaaaccucggaggu

SEQ ID NO: 1374693 - RNA, 23 nt, Human
gcaggguuuugucauguuggcca

SEQ ID NO: 1374694 - RNA, 19 nt, Human
gcccaggcuggagugcagu

SEQ ID NO: 1374695 - RNA, 20 nt, Human
gcccaggcuggagugcagug

SEQ ID NO: 1374696 - RNA, 24 nt, Human
gccccucuuggaaaccucccccau

SEQ ID NO: 1374697 - RNA, 24 nt, Human
gccucagcuucccaaguagcuggg

SEQ ID NO: 1374698 - RNA, 25 nt, Human
gcucugucacccaagcuagagugca

SEQ ID NO: 1374699 - RNA, 23 nt, Human
gcugaucucaaacuccuggccuc

SEQ ID NO: 1374700 - RNA, 28 nt, Human
ggaaaccucccccauucccucaacuccc

SEQ ID NO: 1374701 - RNA, 24 nt, Human
ggccucaaguaacccacccgcuuu

SEQ ID NO: 1374702 - RNA, 23 nt, Human
ggcugaagguaagcgggcgaugc

SEQ ID NO: 1374703 - RNA, 18 nt, Human
gggagggcccuuggggaa

SEQ ID NO: 1374704 - RNA, 19 nt, Human
gggguuuugccauguugcc

SEQ ID NO: 1374705 - RNA, 23 nt, Human
gggguuuugccauguugccuagg

SEQ ID NO: 1374706 - RNA, 21 nt, Human
ggguuuugucauguuggccag

SEQ ID NO: 1374707 - RNA, 22 nt, Human
ggguuuugucauguuggccagg

SEQ ID NO: 1374708 - RNA, 24 nt, Human
guaacccacccgcuuuggccuccc

SEQ ID NO: 1374709 - RNA, 19 nt, Human
guagagaugggguuuugcc

SEQ ID NO: 1374710 - RNA, 21 nt, Human
guagagaugggguuuugccau

SEQ ID NO: 1374711 - RNA, 22 nt, Human
guagagaugggguuuugccaug

SEQ ID NO: 1374712 - RNA, 21 nt, Human
guagaggcaggguuuugucau

SEQ ID NO: 1374713 - RNA, 19 nt, Human
guaggcaccaaagaaagaa

SEQ ID NO: 1374714 - RNA, 19 nt, Human
guauuuuuuguagagaugg

SEQ ID NO: 1374715 - RNA, 18 nt, Human
gucauguuggccaggcug

SEQ ID NO: 1374716 - RNA, 23 nt, Human
gugaggccuguggguucugggag

SEQ ID NO: 1374717 - RNA, 21 nt, Human
gugggaggaucaaaaacaaaa

SEQ ID NO: 1374718 - RNA, 22 nt, Human
guuaucucuuuucuuuucuuug

SEQ ID NO: 1374719 - RNA, 21 nt, Human
guucugggagggcccuugggg

SEQ ID NO: 1374720 - RNA, 24 nt, Human
guuucacucuguugcccaggcugg

SEQ ID NO: 1374721 - RNA, 21 nt, Human
uaaauccccuccuccccgccc

SEQ ID NO: 1374722 - RNA, 24 nt, Human
uaagaucacaggcacacaccacca

SEQ ID NO: 1374723 - RNA, 24 nt, Human
uaaguuuuguauuuuuuguagaga

SEQ ID NO: 1374724 - RNA, 24 nt, Human
uacaaaucaaacaaucugaagcau

SEQ ID NO: 1374725 - RNA, 21 nt, Human
uacacaaaacauauuuguggu

SEQ ID NO: 1374726 - RNA, 20 nt, Human
uaccaaguagcuaagaucac

SEQ ID NO: 1374727 - RNA, 22 nt, Human
uagagaugggguuuugccaugu

SEQ ID NO: 1374728 - RNA, 21 nt, Human
uagaggcaggguuuugucaug

SEQ ID NO: 1374729 - RNA, 23 nt, Human
uagagugcaguggugcaaucuca

SEQ ID NO: 1374730 - RNA, 24 nt, Human
uagagugcaguggugcaaucucag

SEQ ID NO: 1374731 - RNA, 18 nt, Human
uagcaccaggucggaggg

SEQ ID NO: 1374732 - RNA, 23 nt, Human
uaguauagauaugccguaauuuu

SEQ ID NO: 1374733 - RNA, 21 nt, Human
uauagugagaccucaccucua

SEQ ID NO: 1374734 - RNA, 20 nt, Human
uaucaagaaauaggagcuuc

SEQ ID NO: 1374735 - RNA, 23 nt, Human
uauuuuuuaaaacacuauuuaua

SEQ ID NO: 1374736 - RNA, 25 nt, Human
ucaagccauccucccaccucagccu

SEQ ID NO: 1374737 - RNA, 22 nt, Human
ucaccuaaacauaucucuuggu

SEQ ID NO: 1374738 - RNA, 21 nt, Human
ucacucuguugcccaggcugg

SEQ ID NO: 1374739 - RNA, 22 nt, Human
ucacucuguugcccaggcugga

SEQ ID NO: 1374740 - RNA, 24 nt, Human
ucacucuguugcccaggcuggagu

SEQ ID NO: 1374741 - RNA, 19 nt, Human
ucacugcaaccucugccuc

SEQ ID NO: 1374742 - RNA, 24 nt, Human
ucacugcaaccucugccuccuagg

SEQ ID NO: 1374743 - RNA, 25 nt, Human
ucacugcaaccucugccuccuaggc

SEQ ID NO: 1374744 - RNA, 27 nt, Human
ucacugcaaccucugccuccuaggcuc

SEQ ID NO: 1374745 - RNA, 27 nt, Human
ucagcucacugcaaccucugccuccua

SEQ ID NO: 1374746 - RNA, 21 nt, Human
ucaggguaucauuuuggguga

SEQ ID NO: 1374747 - RNA, 27 nt, Human
ucaguugggcuguaaucccagcaguuu

SEQ ID NO: 1374748 - RNA, 24 nt, Human
ucccaaguagcugggauuacaggc

SEQ ID NO: 1374749 - RNA, 20 nt, Human
ucccccauucccucaacucc

SEQ ID NO: 1374750 - RNA, 21 nt, Human
uccuaggcucaagcaauucuc

SEQ ID NO: 1374751 - RNA, 24 nt, Human
uccuaggcucaagcaauucucaug

SEQ ID NO: 1374752 - RNA, 19 nt, Human
uccugccuuccccuuucuu

SEQ ID NO: 1374753 - RNA, 22 nt, Human
uccuggaauacuggggaagggc

SEQ ID NO: 1374754 - RNA, 18 nt, Human
uccuggauucaagccauc

SEQ ID NO: 1374755 - RNA, 22 nt, Human
ucucuuggugauccuuuacauu

SEQ ID NO: 1374756 - RNA, 24 nt, Human
ucugucacccaagcuagagugcag

SEQ ID NO: 1374757 - RNA, 18 nt, Human
ucuguugcccaggcugga

SEQ ID NO: 1374758 - RNA, 24 nt, Human
ucuguugcccaggcuggagugcag

SEQ ID NO: 1374759 - RNA, 18 nt, Human
ucuugcucugucacccaa

SEQ ID NO: 1374760 - RNA, 24 nt, Human
ucuugcucugucacccaagcuaga

SEQ ID NO: 1374761 - RNA, 22 nt, Human
ugagacagaguuucacucuguu

SEQ ID NO: 1374762 - RNA, 19 nt, Human
ugagagugggaaaggggcc

SEQ ID NO: 1374763 - RNA, 22 nt, Human
ugaggugggaggaucaaaaaca

SEQ ID NO: 1374764 - RNA, 21 nt, Human
ugcagggaaaaccucggaggu

SEQ ID NO: 1374765 - RNA, 22 nt, Human
ugcaguggugcaaucucagcuc

SEQ ID NO: 1374766 - RNA, 21 nt, Human
ugccauguugccuagggugcc

SEQ ID NO: 1374767 - RNA, 18 nt, Human
ugcccaggcuggagugca

SEQ ID NO: 1374768 - RNA, 21 nt, Human
ugcccaggcuggagugcagug

SEQ ID NO: 1374769 - RNA, 24 nt, Human
ugcccaggcuggagugcaguggug

SEQ ID NO: 1374770 - RNA, 22 nt, Human
ugccucagcuucccaaguagcu

SEQ ID NO: 1374771 - RNA, 24 nt, Human
ugccucagcuucccaaguagcugg

SEQ ID NO: 1374772 - RNA, 18 nt, Human
uggagugcaguggugcaa

SEQ ID NO: 1374773 - RNA, 23 nt, Human
uggagugcaguggugcaaucuca

SEQ ID NO: 1374774 - RNA, 24 nt, Human
uggagugcaguggugcaaucucag

SEQ ID NO: 1374775 - RNA, 24 nt, Human
uggccaggcugaucucaaacuccu

SEQ ID NO: 1374776 - RNA, 23 nt, Human
uggccucaaguaacccacccgcu

SEQ ID NO: 1374777 - RNA, 27 nt, Human
uggcucugugacccuggacaaggggcc

SEQ ID NO: 1374778 - RNA, 20 nt, Human
ugggaggcugaggcgggaag

SEQ ID NO: 1374779 - RNA, 22 nt, Human
ugggaggcugaggcgggaagau

SEQ ID NO: 1374780 - RNA, 21 nt, Human
ugggauuacaggcgugugcca

SEQ ID NO: 1374781 - RNA, 22 nt, Human
ugggauuacaggcgugugccac

SEQ ID NO: 1374782 - RNA, 22 nt, Human
ugggauuacaggcgugugccac

SEQ ID NO: 1374783 - RNA, 22 nt, Human
ugggauuacaggcgugugccac

SEQ ID NO: 1374784 - RNA, 24 nt, Human
ugggauuacaggcgugugccacug

SEQ ID NO: 1374785 - RNA, 22 nt, Human
ugggauuagaggcgugcgccac

SEQ ID NO: 1374786 - RNA, 24 nt, Human
ugggauuagaggcgugcgccacca

SEQ ID NO: 1374787 - RNA, 22 nt, Human
uggggaagaggggaggagaggu

SEQ ID NO: 1374788 - RNA, 24 nt, Human
ugggguuuugccauguugccuagg

SEQ ID NO: 1374789 - RNA, 24 nt, Human
uggugcaaucucagcccacuguag

SEQ ID NO: 1374790 - RNA, 24 nt, Human
uggugcaaucucagcucacugcaa

SEQ ID NO: 1374791 - RNA, 23 nt, Human
uggugguaaacaccucuagucuc

SEQ ID NO: 1374792 - RNA, 24 nt, Human
uguagagaugggguuuugccaugu

SEQ ID NO: 1374793 - RNA, 24 nt, Human
ugucauguuggccaggcugaucuc

SEQ ID NO: 1374794 - RNA, 26 nt, Human
ugucauguuggccaggcugaucucaa

SEQ ID NO: 1374795 - RNA, 19 nt, Human
uuaaaguagaugucaaugu

SEQ ID NO: 1374796 - RNA, 24 nt, Human
uuacacaaaacauauuugugguuc

SEQ ID NO: 1374797 - RNA, 21 nt, Human
uuacuugagcucaggaguuug

SEQ ID NO: 1374798 - RNA, 18 nt, Human
uuagcuggaugugguggu

SEQ ID NO: 1374799 - RNA, 25 nt, Human
uucaagccauccucccaccucagcc

SEQ ID NO: 1374800 - RNA, 23 nt, Human
uucacucuguugcccaggcugga

SEQ ID NO: 1374801 - RNA, 24 nt, Human
uucacucuguugcccaggcuggag

SEQ ID NO: 1374802 - RNA, 20 nt, Human
uugaagaaugggcacggcug

SEQ ID NO: 1374803 - RNA, 22 nt, Human
uugggaggcugaggcgggaaga

SEQ ID NO: 1374804 - RNA, 21 nt, Human
uuggggaagaggggaggagag

SEQ ID NO: 1374805 - RNA, 24 nt, Human
uuguagagaugggguuuugccaug

SEQ ID NO: 1374806 - RNA, 24 nt, Human
uuguagaggcaggguuuugucaug

SEQ ID NO: 1374807 - RNA, 22 nt, Human
uuucacucuguugcccaggcug

SEQ ID NO: 1374808 - RNA, 23 nt, Human
uuucacucuguugcccaggcugg

SEQ ID NO: 1374809 - RNA, 24 nt, Human
uuucacucuguugcccaggcugga

SEQ ID NO: 1374810 - RNA, 20 nt, Human
uuucucaucuguacaauagg

SEQ ID NO: 1374811 - RNA, 24 nt, Human
uuucucuuuucuugggcaggccuu

SEQ ID NO: 1374812 - RNA, 24 nt, Human
uuuguagagaugggguuuugccau

SEQ ID NO: 1374813 - RNA, 20 nt, Human
uuuguagaggcaggguuuug

SEQ ID NO: 1374814 - RNA, 24 nt, Human
uuuguagaggcaggguuuugucau

SEQ ID NO: 1374815 - RNA, 19 nt, Human
uuuucuuuucuuuguuucu

SEQ ID NO: 1374816 - RNA, 19 nt, Human
uuuugccauguugccuagg

SEQ ID NO: 1374817 - RNA, 24 nt, Human
uuuuuuguagagaugggguuuugc

SEQ ID NO: 1374818 - RNA, 21 nt, Human
uuuuuuguagaggcaggguuu

SEQ ID NO: 1374819 - RNA, 21 nt, Human
uuuuuuguagaggcaggguuu

SEQ ID NO: 1374820 - RNA, 22 nt, Human
aaacacucuuccacuugguuuc

SEQ ID NO: 1374821 - RNA, 18 nt, Human
aaccuguuuacaugcaca

SEQ ID NO: 1374822 - RNA, 22 nt, Human
aaggaggcaucacacaaggaaa

SEQ ID NO: 1374823 - RNA, 23 nt, Human
acaacaaggaagauaaagaggaa

SEQ ID NO: 1374824 - RNA, 18 nt, Human
acaaggaaagccccaccc

SEQ ID NO: 1374825 - RNA, 20 nt, Human
acaaggaaagccccaccccc

SEQ ID NO: 1374826 - RNA, 21 nt, Human
auggagucuuuggggcggucc

SEQ ID NO: 1374827 - RNA, 22 nt, Human
caaaauuagcagcaaugcugag

SEQ ID NO: 1374828 - RNA, 25 nt, Human
caaaguacuugagacauugccugug

SEQ ID NO: 1374829 - RNA, 21 nt, Human
caacaaggaagauaaagagga

SEQ ID NO: 1374830 - RNA, 18 nt, Human
cacaacaaggaagauaaa

SEQ ID NO: 1374831 - RNA, 19 nt, Human
cacacaaggaaagccccac

SEQ ID NO: 1374832 - RNA, 19 nt, Human
cagaaacuagcaggaccaa

SEQ ID NO: 1374833 - RNA, 20 nt, Human
caggcccaagggaaggggcu

SEQ ID NO: 1374834 - RNA, 22 nt, Human
caggcccaagggaaggggcuag

SEQ ID NO: 1374835 - RNA, 20 nt, Human
ccaaagcaguggaaauucau

SEQ ID NO: 1374836 - RNA, 21 nt, Human
ccccgggccucccguagccuu

SEQ ID NO: 1374837 - RNA, 23 nt, Human
ccuaaggucaaaguacuugagac

SEQ ID NO: 1374838 - RNA, 21 nt, Human
ccuucuacccuaaggucaaag

SEQ ID NO: 1374839 - RNA, 20 nt, Human
cgcaagcgccccgggccucc

SEQ ID NO: 1374840 - RNA, 20 nt, Human
cgccccgggccucccguagc

SEQ ID NO: 1374841 - RNA, 22 nt, Human
cugagcaaaggaaccuguuuac

SEQ ID NO: 1374842 - RNA, 19 nt, Human
gaaagccccacccccuacu

SEQ ID NO: 1374843 - RNA, 19 nt, Human
gagacauuuacuggcagcu

SEQ ID NO: 1374844 - RNA, 19 nt, Human
gaggcaucacacaaggaaa

SEQ ID NO: 1374845 - RNA, 19 nt, Human
gccccgggccucccguagc

SEQ ID NO: 1374846 - RNA, 24 nt, Human
gccuugauggucugcugcuuccgu

SEQ ID NO: 1374847 - RNA, 20 nt, Human
ggcagcuuugccuucuaccc

SEQ ID NO: 1374848 - RNA, 19 nt, Human
ggcuaggauucggcugacu

SEQ ID NO: 1374849 - RNA, 22 nt, Human
gggccucccguagccuugaugg

SEQ ID NO: 1374850 - RNA, 24 nt, Human
gucacugaugucgagcaccacagc

SEQ ID NO: 1374851 - RNA, 24 nt, Human
gugugccuaaggaggcaucacaca

SEQ ID NO: 1374852 - RNA, 19 nt, Human
uaaggaggcaucacacaag

SEQ ID NO: 1374853 - RNA, 20 nt, Human
uacaacacauuuauuuguac

SEQ ID NO: 1374854 - RNA, 26 nt, Human
uaggauucggcugacucagguccauc

SEQ ID NO: 1374855 - RNA, 21 nt, Human
uccagaaacuagcaggaccaa

SEQ ID NO: 1374856 - RNA, 19 nt, Human
ugacucagguccaucccau

SEQ ID NO: 1374857 - RNA, 21 nt, Human
ugacucagguccaucccaugg

SEQ ID NO: 1374858 - RNA, 21 nt, Human
ugaugucgagcaccacagcag

SEQ ID NO: 1374859 - RNA, 18 nt, Human
uuuacuggcagcuuugcc

SEQ ID NO: 1374860 - RNA, 21 nt, Human
aaacagaaacguccaccaagg

SEQ ID NO: 1374861 - RNA, 23 nt, Human
aaauagcccugcaaccagccgga

SEQ ID NO: 1374862 - RNA, 19 nt, Human
aaauguuacaggcugaugc

SEQ ID NO: 1374863 - RNA, 25 nt, Human
aacaucacagucccaaucucagaac

SEQ ID NO: 1374864 - RNA, 18 nt, Human
aacaugggccugcaugca

SEQ ID NO: 1374865 - RNA, 20 nt, Human
aagaagaggcagcccacagc

SEQ ID NO: 1374866 - RNA, 24 nt, Human
aagagaaaaggagucuggucuguu

SEQ ID NO: 1374867 - RNA, 24 nt, Human
aaggaaagagaagaaauguuacag

SEQ ID NO: 1374868 - RNA, 19 nt, Human
aauacacagcuaaagaggg

SEQ ID NO: 1374869 - RNA, 18 nt, Human
acaaaccacaccccuucc

SEQ ID NO: 1374870 - RNA, 23 nt, Human
acacacacgcacguacacacaca

SEQ ID NO: 1374871 - RNA, 20 nt, Human
acacagcuaaagagggggaa

SEQ ID NO: 1374872 - RNA, 32 nt, Human
acacaggaacacacacacacacgcacguacag

SEQ ID NO: 1374873 - RNA, 23 nt, Human
acagaaagggugggugaaaaucg

SEQ ID NO: 1374874 - RNA, 20 nt, Human
acagaagacgccagcucaca

SEQ ID NO: 1374875 - RNA, 20 nt, Human
acagccaacucuccuacaua

SEQ ID NO: 1374876 - RNA, 23 nt, Human
accaaggaggacaugggcaggac

SEQ ID NO: 1374877 - RNA, 22 nt, Human
acccugcaccuauaucugcuac

SEQ ID NO: 1374878 - RNA, 20 nt, Human
acucugauaaccuccuacca

SEQ ID NO: 1374879 - RNA, 23 nt, Human
agaagacgccagcucacacucuu

SEQ ID NO: 1374880 - RNA, 20 nt, Human
agaagagaaaaggagucugg

SEQ ID NO: 1374881 - RNA, 21 nt, Human
agaggaggaagggcuuccucc

SEQ ID NO: 1374882 - RNA, 18 nt, Human
agauucugggcuggcugc

SEQ ID NO: 1374883 - RNA, 23 nt, Human
agcagaugcagccucacacuccc

SEQ ID NO: 1374884 - RNA, 18 nt, Human
agcagcauuuggaggaca

SEQ ID NO: 1374885 - RNA, 22 nt, Human
agccaagagugccgaggaccca

SEQ ID NO: 1374886 - RNA, 24 nt, Human
aggaaagagaagaaauguuacagg

SEQ ID NO: 1374887 - RNA, 21 nt, Human
aggagcagggucacagagcuc

SEQ ID NO: 1374888 - RNA, 18 nt, Human
aggaggaggugcacugcc

SEQ ID NO: 1374889 - RNA, 18 nt, Human
aggcugaaacaugggccu

SEQ ID NO: 1374890 - RNA, 19 nt, Human
aggggcagaugcugaggcu

SEQ ID NO: 1374891 - RNA, 18 nt, Human
aucaauggccuucugaaa

SEQ ID NO: 1374892 - RNA, 20 nt, Human
auccaugugcaaaccccaag

SEQ ID NO: 1374893 - RNA, 21 nt, Human
auggugacaacugcuaggcag

SEQ ID NO: 1374894 - RNA, 19 nt, Human
caaaacaggaucuacgaac

SEQ ID NO: 1374895 - RNA, 21 nt, Human
caaaggaaagagaagaaaugu

SEQ ID NO: 1374896 - RNA, 22 nt, Human
caauagagcuggugucguccca

SEQ ID NO: 1374897 - RNA, 26 nt, Human
cacacacacgugcacaaauacacagc

SEQ ID NO: 1374898 - RNA, 25 nt, Human
cacacaggcacguaacauacacagu

SEQ ID NO: 1374899 - RNA, 19 nt, Human
cacagucccaaucucagaa

SEQ ID NO: 1374900 - RNA, 19 nt, Human
caccaaggaggacaugggc

SEQ ID NO: 1374901 - RNA, 23 nt, Human
cacccugcaccuauaucugcuac

SEQ ID NO: 1374902 - RNA, 24 nt, Human
cacccuucccucggcccggugcac

SEQ ID NO: 1374903 - RNA, 19 nt, Human
cacgguuucccuuugcucc

SEQ ID NO: 1374904 - RNA, 20 nt, Human
cacguucucacggccagggg

SEQ ID NO: 1374905 - RNA, 25 nt, Human
cacuuugguaacuucuaagccugag

SEQ ID NO: 1374906 - RNA, 19 nt, Human
cagaagacagggccucugc

SEQ ID NO: 1374907 - RNA, 18 nt, Human
cagaagacgccagcucac

SEQ ID NO: 1374908 - RNA, 19 nt, Human
cagagcccgaacuuggaac

SEQ ID NO: 1374909 - RNA, 22 nt, Human
cagagcccgaacuuggaaccag

SEQ ID NO: 1374910 - RNA, 21 nt, Human
cagcaccauuuauguccucug

SEQ ID NO: 1374911 - RNA, 24 nt, Human
cagcagcacaacauaaauaaugcc

SEQ ID NO: 1374912 - RNA, 21 nt, Human
cagccggacuuacugucuaaa

SEQ ID NO: 1374913 - RNA, 20 nt, Human
cagcucuccuggcuuuggaa

SEQ ID NO: 1374914 - RNA, 30 nt, Human
caggaacacacacacacacgcacguacaca

SEQ ID NO: 1374915 - RNA, 21 nt, Human
caggagcacaagccagagauc

SEQ ID NO: 1374916 - RNA, 24 nt, Human
caggauggucucuagcagcucuga

SEQ ID NO: 1374917 - RNA, 23 nt, Human
cagggccucugcuacucccggcu

SEQ ID NO: 1374918 - RNA, 22 nt, Human
caguguggggccgggcacuggu

SEQ ID NO: 1374919 - RNA, 21 nt, Human
cauagccaggaagguccucug

SEQ ID NO: 1374920 - RNA, 25 nt, Human
caugcacacagccccauuuuauacg

SEQ ID NO: 1374921 - RNA, 21 nt, Human
caugcuggaagugcacaucca

SEQ ID NO: 1374922 - RNA, 24 nt, Human
caugggcaggacacaggucuggcc

SEQ ID NO: 1374923 - RNA, 23 nt, Human
cauuuauguccucuggccaggga

SEQ ID NO: 1374924 - RNA, 18 nt, Human
ccaaaucugaaggcugac

SEQ ID NO: 1374925 - RNA, 23 nt, Human
ccaacaucacagucccaaucuca

SEQ ID NO: 1374926 - RNA, 25 nt, Human
ccacugaaagagcauagcuuccccc

SEQ ID NO: 1374927 - RNA, 23 nt, Human
ccagaaauccuaaagcuacagcc

SEQ ID NO: 1374928 - RNA, 21 nt, Human
ccagcagaugcagccucacac

SEQ ID NO: 1374929 - RNA, 21 nt, Human
ccagcaggggcagaugcugag

SEQ ID NO: 1374930 - RNA, 22 nt, Human
ccauacauuucugcaguccuuc

SEQ ID NO: 1374931 - RNA, 18 nt, Human
cccaacaucacaguccca

SEQ ID NO: 1374932 - RNA, 24 nt, Human
cccacuacuacugacuggcugacc

SEQ ID NO: 1374933 - RNA, 19 nt, Human
ccccaguauucuaccaucc

SEQ ID NO: 1374934 - RNA, 23 nt, Human
ccccaguauucuaccauccaguc

SEQ ID NO: 1374935 - RNA, 24 nt, Human
cccccagaaucacuuugauuuaaa

SEQ ID NO: 1374936 - RNA, 22 nt, Human
cccgaacuuggaaccaggagau

SEQ ID NO: 1374937 - RNA, 19 nt, Human
ccgcucccaacagcagcag

SEQ ID NO: 1374938 - RNA, 20 nt, Human
ccuaaggaagaacaagucaa

SEQ ID NO: 1374939 - RNA, 19 nt, Human
ccucaggucccaacaucac

SEQ ID NO: 1374940 - RNA, 19 nt, Human
ccugcauagccaggaaggu

SEQ ID NO: 1374941 - RNA, 20 nt, Human
ccuucaaccagcuuucagag

SEQ ID NO: 1374942 - RNA, 24 nt, Human
ccuuugcuccguugcucugugauc

SEQ ID NO: 1374943 - RNA, 25 nt, Human
cgaaacacagaagcaaaaccccuga

SEQ ID NO: 1374944 - RNA, 23 nt, Human
cgggcacugguucugcccuuuuc

SEQ ID NO: 1374945 - RNA, 24 nt, Human
cuaaagcuacagccaacucuccua

SEQ ID NO: 1374946 - RNA, 23 nt, Human
cuacaaugagaguccacuuuucc

SEQ ID NO: 1374947 - RNA, 22 nt, Human
cucacacucccgaaagccuuug

SEQ ID NO: 1374948 - RNA, 18 nt, Human
cucacacucuuccuagca

SEQ ID NO: 1374949 - RNA, 20 nt, Human
cucucacucagccacccuuc

SEQ ID NO: 1374950 - RNA, 21 nt, Human
cucuggcuggagcugcccuuc

SEQ ID NO: 1374951 - RNA, 23 nt, Human
cugacccuuugcuugaugccuaa

SEQ ID NO: 1374952 - RNA, 22 nt, Human
cugaggcugaaacaugggccug

SEQ ID NO: 1374953 - RNA, 23 nt, Human
cugaggcugaaacaugggccugc

SEQ ID NO: 1374954 - RNA, 19 nt, Human
cugcaguccuucaaugucu

SEQ ID NO: 1374955 - RNA, 23 nt, Human
cugccuucucugaaguuugcucc

SEQ ID NO: 1374956 - RNA, 21 nt, Human
cuggagcugcccuuccugggu

SEQ ID NO: 1374957 - RNA, 22 nt, Human
cuggugacgggacagaagagaa

SEQ ID NO: 1374958 - RNA, 23 nt, Human
cuuugcuccguugcucugugauc

SEQ ID NO: 1374959 - RNA, 19 nt, Human
gaacgacucaguggcacaa

SEQ ID NO: 1374960 - RNA, 20 nt, Human
gaacucggaugggcaggaug

SEQ ID NO: 1374961 - RNA, 20 nt, Human
gaacuuggaaccaggagaug

SEQ ID NO: 1374962 - RNA, 20 nt, Human
gagcccgaacuuggaaccag

SEQ ID NO: 1374963 - RNA, 24 nt, Human
gagcgagcuucuuuucagcaggag

SEQ ID NO: 1374964 - RNA, 21 nt, Human
gaggcauucugggggaaagac

SEQ ID NO: 1374965 - RNA, 23 nt, Human
gagggggaauucaucaauggccu

SEQ ID NO: 1374966 - RNA, 23 nt, Human
gaucauauuucuacuuauccugg

SEQ ID NO: 1374967 - RNA, 22 nt, Human
gcaaggcaauguaucuuccucu

SEQ ID NO: 1374968 - RNA, 23 nt, Human
gcacccugcaccuauaucugcua

SEQ ID NO: 1374969 - RNA, 29 nt, Human
gcacguacacacacacgugcacaaauaca

SEQ ID NO: 1374970 - RNA, 21 nt, Human
gcagacaucuggagcgagcuu

SEQ ID NO: 1374971 - RNA, 22 nt, Human
gcagccucacacucccgaaagc

SEQ ID NO: 1374972 - RNA, 18 nt, Human
gcauagcuucccccagaa

SEQ ID NO: 1374973 - RNA, 21 nt, Human
gccaaauuggcuuccagaaau

SEQ ID NO: 1374974 - RNA, 21 nt, Human
gccaaccucaaguccugccac

SEQ ID NO: 1374975 - RNA, 22 nt, Human
gccagggguguggaagcaauag

SEQ ID NO: 1374976 - RNA, 22 nt, Human
gcccggugcacccauacauuuc

SEQ ID NO: 1374977 - RNA, 19 nt, Human
gcgaaacacagaagcaaaa

SEQ ID NO: 1374978 - RNA, 18 nt, Human
gcuacacauaccaugcug

SEQ ID NO: 1374979 - RNA, 20 nt, Human
gcuuggagaaauugggguga

SEQ ID NO: 1374980 - RNA, 20 nt, Human
ggaaagaagaggcagcccac

SEQ ID NO: 1374981 - RNA, 18 nt, Human
ggacacaggucuggcccu

SEQ ID NO: 1374982 - RNA, 21 nt, Human
ggacagaaccaccaaggggcu

SEQ ID NO: 1374983 - RNA, 23 nt, Human
ggagcagggucacagagcucaag

SEQ ID NO: 1374984 - RNA, 20 nt, Human
ggaggacaugggcaggacac

SEQ ID NO: 1374985 - RNA, 21 nt, Human
ggcacaaaggaaagagaagaa

SEQ ID NO: 1374986 - RNA, 25 nt, Human
ggcgaaacacagaagcaaaaccccu

SEQ ID NO: 1374987 - RNA, 21 nt, Human
gggaagacacuggggagggcu

SEQ ID NO: 1374988 - RNA, 21 nt, Human
ggggcucugagaaagcuaccu

SEQ ID NO: 1374989 - RNA, 21 nt, Human
ggugacgggacagaagagaaa

SEQ ID NO: 1374990 - RNA, 19 nt, Human
uaaaccaaauaacacagug

SEQ ID NO: 1374991 - RNA, 19 nt, Human
uaaccuccuaccagcacca

SEQ ID NO: 1374992 - RNA, 19 nt, Human
uaagagauucugggcuggc

SEQ ID NO: 1374993 - RNA, 18 nt, Human
uaauuucaaagacaaacc

SEQ ID NO: 1374994 - RNA, 19 nt, Human
uacacaggaacacacacac

SEQ ID NO: 1374995 - RNA, 22 nt, Human
uaccaugcuggaagugcacauc

SEQ ID NO: 1374996 - RNA, 33 nt, Human
uacuuacacaggaacacacacacacacgcagug

SEQ ID NO: 1374997 - RNA, 19 nt, Human
uagaacagaaagggugggu

SEQ ID NO: 1374998 - RNA, 25 nt, Human
ucaacaaugauagcauauuccuaag

SEQ ID NO: 1374999 - RNA, 21 nt, Human
ucacacauaucuagccagggc

SEQ ID NO: 1375000 - RNA, 23 nt, Human
ucacacucccgaaagccuuugcc

SEQ ID NO: 1375001 - RNA, 21 nt, Human
ucagaacucggaugggcagga

SEQ ID NO: 1375002 - RNA, 22 nt, Human
ucagccacccuucccucggccc

SEQ ID NO: 1375003 - RNA, 23 nt, Human
uccaccauagaacagaaagggug

SEQ ID NO: 1375004 - RNA, 21 nt, Human
ucccaucccuucaccuggaag

SEQ ID NO: 1375005 - RNA, 24 nt, Human
uccugauuaaaaccuuugaguccu

SEQ ID NO: 1375006 - RNA, 22 nt, Human
uccuucuccuaaggaagaacaa

SEQ ID NO: 1375007 - RNA, 21 nt, Human
ucgguaugaaaccaggcuggu

SEQ ID NO: 1375008 - RNA, 24 nt, Human
ucuaagccugagacuucagaagac

SEQ ID NO: 1375009 - RNA, 18 nt, Human
ucuaaggcagaguggaag

SEQ ID NO: 1375010 - RNA, 19 nt, Human
ugacaggagcagggucaca

SEQ ID NO: 1375011 - RNA, 21 nt, Human
ugacaggcacccugcaccuau

SEQ ID NO: 1375012 - RNA, 23 nt, Human
ugacgggacagaagagaaaagga

SEQ ID NO: 1375013 - RNA, 19 nt, Human
ugagcuuuggcgaaacaca

SEQ ID NO: 1375014 - RNA, 20 nt, Human
ugaggagggccaaccucaag

SEQ ID NO: 1375015 - RNA, 20 nt, Human
ugaguaaacagaaacgucca

SEQ ID NO: 1375016 - RNA, 21 nt, Human
ugcacccagcaggggcagaug

SEQ ID NO: 1375017 - RNA, 23 nt, Human
ugcgcguagugucagaccagcug

SEQ ID NO: 1375018 - RNA, 21 nt, Human
ugcugcucuccuucaaccagc

SEQ ID NO: 1375019 - RNA, 23 nt, Human
uggaaccaggagaugacaguuuc

SEQ ID NO: 1375020 - RNA, 21 nt, Human
uggaagcaauagccugcaucc

SEQ ID NO: 1375021 - RNA, 21 nt, Human
uggaagucagcucuccuggcu

SEQ ID NO: 1375022 - RNA, 24 nt, Human
uggcugacccuuugcuugaugccu

SEQ ID NO: 1375023 - RNA, 18 nt, Human
ugggaagacacuggggag

SEQ ID NO: 1375024 - RNA, 22 nt, Human
ugggcaggacacaggucuggcc

SEQ ID NO: 1375025 - RNA, 23 nt, Human
ugggcugaggcugaaacaugggc

SEQ ID NO: 1375026 - RNA, 18 nt, Human
uggggccauauggguggg

SEQ ID NO: 1375027 - RNA, 24 nt, Human
uguccucuggccagggaacgacuc

SEQ ID NO: 1375028 - RNA, 23 nt, Human
ugugcaaaccccaaaacaggauc

SEQ ID NO: 1375029 - RNA, 19 nt, Human
uucauuuauugaaaagaaa

SEQ ID NO: 1375030 - RNA, 19 nt, Human
uuccccuaauggccucaga

SEQ ID NO: 1375031 - RNA, 19 nt, Human
uuccuuuuccccuaauggc

SEQ ID NO: 1375032 - RNA, 23 nt, Human
uuggaacagaagagacagaaaaa

SEQ ID NO: 1375033 - RNA, 22 nt, Human
uuggagaaauuggggugacagg

SEQ ID NO: 1375034 - RNA, 20 nt, Human
uugguaacuucuaagccuga

SEQ ID NO: 1375035 - RNA, 21 nt, Human
uuuaggaggaggugcacugcc

SEQ ID NO: 1375036 - RNA, 18 nt, Human
uuuugcugcucuccuuca

SEQ ID NO: 1375037 - RNA, 20 nt, Human
aucccggauccgcgcggccc

SEQ ID NO: 1375038 - RNA, 23 nt, Human
cagaucccggauccgcgcggccc

SEQ ID NO: 1375039 - RNA, 21 nt, Human
ccccagcgcagaucccggauc

SEQ ID NO: 1375040 - RNA, 18 nt, Human
ccccccagcgcagauccc

SEQ ID NO: 1375041 - RNA, 21 nt, Human
ccccgcacgcggggacccccc

SEQ ID NO: 1375042 - RNA, 20 nt, Human
cccggccuccuccgcagggc

SEQ ID NO: 1375043 - RNA, 25 nt, Human
ccgcccgggauaccgacuggcggcc

SEQ ID NO: 1375044 - RNA, 18 nt, Human
ccggcggugguaccgcuu

SEQ ID NO: 1375045 - RNA, 30 nt, Human
cgcagaucccggauccgcgcggcccuucuc

SEQ ID NO: 1375046 - RNA, 20 nt, Human
cgccugguuauggcagggcc

SEQ ID NO: 1375047 - RNA, 18 nt, Human
cggccgcccccgccgccc

SEQ ID NO: 1375048 - RNA, 22 nt, Human
cuccgcagggcugggcgccugg

SEQ ID NO: 1375049 - RNA, 21 nt, Human
cugccgcaggaaguccuccuc

SEQ ID NO: 1375050 - RNA, 21 nt, Human
cugggagccccggccuccucc

SEQ ID NO: 1375051 - RNA, 24 nt, Human
gaccugccgcaggaaguccuccuc

SEQ ID NO: 1375052 - RNA, 19 nt, Human
gccgccgcuucuccacugc

SEQ ID NO: 1375053 - RNA, 21 nt, Human
gccgccgcuucuccacugccg

SEQ ID NO: 1375054 - RNA, 19 nt, Human
gccgcuucuccacugccgc

SEQ ID NO: 1375055 - RNA, 21 nt, Human
gccggcggugguaccgcuugc

SEQ ID NO: 1375056 - RNA, 23 nt, Human
gccugguuauggcagggccucac

SEQ ID NO: 1375057 - RNA, 22 nt, Human
gcguccgcuuccugggagcccc

SEQ ID NO: 1375058 - RNA, 21 nt, Human
ggcucccgcggggguggaggg

SEQ ID NO: 1375059 - RNA, 20 nt, Human
gggcaggggcucccgcgggg

SEQ ID NO: 1375060 - RNA, 19 nt, Human
ggggaccgggcguccgcuu

SEQ ID NO: 1375061 - RNA, 21 nt, Human
ucccgcggggguggaggggcg

SEQ ID NO: 1375062 - RNA, 19 nt, Human
uccgcgcgccccgcacgcg

SEQ ID NO: 1375063 - RNA, 20 nt, Human
uccgcgcgccccgcacgcgg

SEQ ID NO: 1375064 - RNA, 19 nt, Human
uggaggggcggccgcggcg

SEQ ID NO: 1375065 - RNA, 25 nt, Human
uggggcaggggcucccgcgggggug

SEQ ID NO: 1375066 - RNA, 19 nt, Human
aaacgcagauguggcuucu

SEQ ID NO: 1375067 - RNA, 21 nt, Human
aaaggacaaacgcagaugugg

SEQ ID NO: 1375068 - RNA, 20 nt, Human
acacaaaauagauuucagcc

SEQ ID NO: 1375069 - RNA, 18 nt, Human
agccggcagaacuggagg

SEQ ID NO: 1375070 - RNA, 21 nt, Human
caaaauagauuucagccacgu

SEQ ID NO: 1375071 - RNA, 22 nt, Human
caaaggacaaacgcagaugugg

SEQ ID NO: 1375072 - RNA, 20 nt, Human
ccccgcgcugcaggcccccc

SEQ ID NO: 1375073 - RNA, 22 nt, Human
ccgggccccgcgcugcaggccc

SEQ ID NO: 1375074 - RNA, 21 nt, Human
ccggggcuuccaugaggcgcc

SEQ ID NO: 1375075 - RNA, 19 nt, Human
cgauuucaugacuuuccuu

SEQ ID NO: 1375076 - RNA, 20 nt, Human
cggaaggagaggcggccccg

SEQ ID NO: 1375077 - RNA, 23 nt, Human
cugcaggccccccuccgccgccu

SEQ ID NO: 1375078 - RNA, 24 nt, Human
ggacaaacgcagauguggcuucuc

SEQ ID NO: 1375079 - RNA, 18 nt, Human
uaagaaauccguagggau

SEQ ID NO: 1375080 - RNA, 20 nt, Human
ucucuuugggcaggccuggg

SEQ ID NO: 1375081 - RNA, 24 nt, Human
ucuuugggcaggccugggccagga

SEQ ID NO: 1375082 - RNA, 23 nt, Human
uguggcuucucuuugggcaggcc

SEQ ID NO: 1375083 - RNA, 21 nt, Human
uuguaucaccuuuuauuacac

SEQ ID NO: 1375084 - RNA, 22 nt, Human
aaaaucuuugaccuugcucaua

SEQ ID NO: 1375085 - RNA, 19 nt, Human
aaaccaccagugaaucuag

SEQ ID NO: 1375086 - RNA, 21 nt, Human
aaaugaccgauguggcauaaa

SEQ ID NO: 1375087 - RNA, 22 nt, Human
aacucuaaaaugccuugccagc

SEQ ID NO: 1375088 - RNA, 23 nt, Human
aagauggacccaaucauugcaga

SEQ ID NO: 1375089 - RNA, 23 nt, Human
aagcagggccaagggcugugauc

SEQ ID NO: 1375090 - RNA, 24 nt, Human
aaguaggaggcaguuucucccaag

SEQ ID NO: 1375091 - RNA, 18 nt, Human
aaguaugaagcagggcca

SEQ ID NO: 1375092 - RNA, 21 nt, Human
acagagcccugccucaggcug

SEQ ID NO: 1375093 - RNA, 25 nt, Human
acagagcccugccucaggcuguugg

SEQ ID NO: 1375094 - RNA, 23 nt, Human
acccaguccacaucccuccccuu

SEQ ID NO: 1375095 - RNA, 24 nt, Human
accugacggcuaagccagggauga

SEQ ID NO: 1375096 - RNA, 23 nt, Human
acuuucaggagccucugguuuuu

SEQ ID NO: 1375097 - RNA, 24 nt, Human
agaagaagacagaugugaggugca

SEQ ID NO: 1375098 - RNA, 23 nt, Human
agaaugagaggagauggucugga

SEQ ID NO: 1375099 - RNA, 18 nt, Human
agagcagaccagguuuuu

SEQ ID NO: 1375100 - RNA, 18 nt, Human
agaggugggccacccucg

SEQ ID NO: 1375101 - RNA, 22 nt, Human
agauauguggccugcuuacccu

SEQ ID NO: 1375102 - RNA, 21 nt, Human
agcaagauggacccaaucauu

SEQ ID NO: 1375103 - RNA, 18 nt, Human
agcaggcagcuggggaug

SEQ ID NO: 1375104 - RNA, 22 nt, Human
agcaggcagcuggggauggucc

SEQ ID NO: 1375105 - RNA, 19 nt, Human
agcucccucccuuagaagc

SEQ ID NO: 1375106 - RNA, 19 nt, Human
aggaauaccagagaugacc

SEQ ID NO: 1375107 - RNA, 22 nt, Human
aggagagacaccucugcccagc

SEQ ID NO: 1375108 - RNA, 22 nt, Human
aggaggagcccugggggcugcc

SEQ ID NO: 1375109 - RNA, 21 nt, Human
aggcagagucaagacaaucau

SEQ ID NO: 1375110 - RNA, 19 nt, Human
aggcaggcuggugggcuuc

SEQ ID NO: 1375111 - RNA, 21 nt, Human
aggcaggcuggugggcuucac

SEQ ID NO: 1375112 - RNA, 22 nt, Human
aggugcaggucauaagccuggg

SEQ ID NO: 1375113 - RNA, 18 nt, Human
aguaacugucuacuccau

SEQ ID NO: 1375114 - RNA, 24 nt, Human
aguggcggagaagguucugucuca

SEQ ID NO: 1375115 - RNA, 19 nt, Human
auaaaauauacagugcuac

SEQ ID NO: 1375116 - RNA, 21 nt, Human
aucccaccacacuagagagca

SEQ ID NO: 1375117 - RNA, 22 nt, Human
aucccuccccuuccucuuccua

SEQ ID NO: 1375118 - RNA, 19 nt, Human
augggcgcccccuaguggg

SEQ ID NO: 1375119 - RNA, 18 nt, Human
augggggagguaccagga

SEQ ID NO: 1375120 - RNA, 22 nt, Human
auuugggcaccagguuucagcc

SEQ ID NO: 1375121 - RNA, 24 nt, Human
caaggcagagucaagacaaucauu

SEQ ID NO: 1375122 - RNA, 26 nt, Human
caagggaaugucacagaugggggagg

SEQ ID NO: 1375123 - RNA, 27 nt, Human
caccaguaagaacuaaaucccugggcc

SEQ ID NO: 1375124 - RNA, 20 nt, Human
caccucugcccagcccuacc

SEQ ID NO: 1375125 - RNA, 18 nt, Human
caccugguguaaacgacu

SEQ ID NO: 1375126 - RNA, 23 nt, Human
cacugagcguuuaguagcucugg

SEQ ID NO: 1375127 - RNA, 24 nt, Human
cacuggaggaggagcccugggggc

SEQ ID NO: 1375128 - RNA, 23 nt, Human
cagaauguccaaggugcuuccuc

SEQ ID NO: 1375129 - RNA, 19 nt, Human
cagaauugaauccaggcug

SEQ ID NO: 1375130 - RNA, 21 nt, Human
cagaauugaauccaggcugac

SEQ ID NO: 1375131 - RNA, 19 nt, Human
cagagcccugccucaggcu

SEQ ID NO: 1375132 - RNA, 21 nt, Human
cagcaaugggggacuguugca

SEQ ID NO: 1375133 - RNA, 18 nt, Human
cauaagcagaugccugcc

SEQ ID NO: 1375134 - RNA, 22 nt, Human
caucugaggacggcuauugcuc

SEQ ID NO: 1375135 - RNA, 22 nt, Human
ccacugccggccugggccacag

SEQ ID NO: 1375136 - RNA, 21 nt, Human
ccacuggaugaucccuuuuau

SEQ ID NO: 1375137 - RNA, 23 nt, Human
ccauaagauggcaauggcucaug

SEQ ID NO: 1375138 - RNA, 22 nt, Human
cccauccccuucacuccgggaa

SEQ ID NO: 1375139 - RNA, 21 nt, Human
ccccauccuccucuccaccug

SEQ ID NO: 1375140 - RNA, 24 nt, Human
ccccuagugggguuaccaucgcuc

SEQ ID NO: 1375141 - RNA, 22 nt, Human
ccccuugccguucauggagacu

SEQ ID NO: 1375142 - RNA, 18 nt, Human
cccuccccuuccucuucc

SEQ ID NO: 1375143 - RNA, 19 nt, Human
cccugccucaggcuguugg

SEQ ID NO: 1375144 - RNA, 19 nt, Human
cccuuccucuuccuagauc

SEQ ID NO: 1375145 - RNA, 22 nt, Human
ccggucugccuagagccgggag

SEQ ID NO: 1375146 - RNA, 18 nt, Human
ccuccccuuccucuuccu

SEQ ID NO: 1375147 - RNA, 19 nt, Human
ccugccaguagagaaaugc

SEQ ID NO: 1375148 - RNA, 19 nt, Human
ccuggauaauaaaaauucc

SEQ ID NO: 1375149 - RNA, 23 nt, Human
ccuuccaccugcuuuucuccuca

SEQ ID NO: 1375150 - RNA, 21 nt, Human
ccuuggaagucauguaggcug

SEQ ID NO: 1375151 - RNA, 21 nt, Human
ccuuuagggcugaaaccuggg

SEQ ID NO: 1375152 - RNA, 19 nt, Human
cuagaaucuuccgccagca

SEQ ID NO: 1375153 - RNA, 21 nt, Human
cuagcagccuuuaagcucccu

SEQ ID NO: 1375154 - RNA, 21 nt, Human
cucaaggagagacaccucugc

SEQ ID NO: 1375155 - RNA, 19 nt, Human
cucagauuaaggcgaaaca

SEQ ID NO: 1375156 - RNA, 19 nt, Human
cuccacacucgcaaacuga

SEQ ID NO: 1375157 - RNA, 22 nt, Human
cuccacacucgcaaacugacug

SEQ ID NO: 1375158 - RNA, 24 nt, Human
cuccucagguucugcugugucucu

SEQ ID NO: 1375159 - RNA, 18 nt, Human
cucugugaggugcucuga

SEQ ID NO: 1375160 - RNA, 20 nt, Human
cugacucgguuucucugggg

SEQ ID NO: 1375161 - RNA, 20 nt, Human
cugagcuggcaucaaacacc

SEQ ID NO: 1375162 - RNA, 21 nt, Human
cugccuugaagaaacacucca

SEQ ID NO: 1375163 - RNA, 19 nt, Human
cugugcaugaucauggggg

SEQ ID NO: 1375164 - RNA, 18 nt, Human
cuuccucccagcaaaggg

SEQ ID NO: 1375165 - RNA, 20 nt, Human
cuucuuaggaugaguccugg

SEQ ID NO: 1375166 - RNA, 23 nt, Human
gaaggcagagccugcuguccauc

SEQ ID NO: 1375167 - RNA, 19 nt, Human
gaagugggggaagccuggg

SEQ ID NO: 1375168 - RNA, 18 nt, Human
gaaguucaucccaccaca

SEQ ID NO: 1375169 - RNA, 22 nt, Human
gaccuccaggguagcuacccag

SEQ ID NO: 1375170 - RNA, 18 nt, Human
gagaggccaacauucuuc

SEQ ID NO: 1375171 - RNA, 19 nt, Human
gagcucacuggaggaggag

SEQ ID NO: 1375172 - RNA, 22 nt, Human
gagcucacuggaggaggagccc

SEQ ID NO: 1375173 - RNA, 23 nt, Human
gaggagcccugggggcugcccag

SEQ ID NO: 1375174 - RNA, 18 nt, Human
gcaacuggugacuggaug

SEQ ID NO: 1375175 - RNA, 20 nt, Human
gccugcuuacccuuaagggg

SEQ ID NO: 1375176 - RNA, 18 nt, Human
gccugggccacagagccc

SEQ ID NO: 1375177 - RNA, 22 nt, Human
gcggagaagguucugucucaga

SEQ ID NO: 1375178 - RNA, 25 nt, Human
gcuacagccaugguaucaauccacc

SEQ ID NO: 1375179 - RNA, 20 nt, Human
gcuagagugaggaauaccag

SEQ ID NO: 1375180 - RNA, 19 nt, Human
gcuccauaacuccaggaac

SEQ ID NO: 1375181 - RNA, 21 nt, Human
gcucuacccccauccccuuca

SEQ ID NO: 1375182 - RNA, 18 nt, Human
ggacgccaaucuaaaaac

SEQ ID NO: 1375183 - RNA, 24 nt, Human
ggagcaggcagcuggggauggucc

SEQ ID NO: 1375184 - RNA, 19 nt, Human
ggaggaacagaggacucug

SEQ ID NO: 1375185 - RNA, 19 nt, Human
ggauuccaaagggaaggcu

SEQ ID NO: 1375186 - RNA, 19 nt, Human
ggcacuccugagacagucu

SEQ ID NO: 1375187 - RNA, 25 nt, Human
ggcagagcugagaaaauuugagggg

SEQ ID NO: 1375188 - RNA, 19 nt, Human
ggccaugaagacagaagga

SEQ ID NO: 1375189 - RNA, 21 nt, Human
gggaagugggggaagccuggg

SEQ ID NO: 1375190 - RNA, 22 nt, Human
gggaagugggggaagccugggu

SEQ ID NO: 1375191 - RNA, 19 nt, Human
gggcagggcuuaucuggcc

SEQ ID NO: 1375192 - RNA, 18 nt, Human
ggggaagugggggaagcc

SEQ ID NO: 1375193 - RNA, 18 nt, Human
ggggcaggugucagaaaa

SEQ ID NO: 1375194 - RNA, 20 nt, Human
gguccccauguggcucccag

SEQ ID NO: 1375195 - RNA, 18 nt, Human
ggugcaggucauaagccu

SEQ ID NO: 1375196 - RNA, 25 nt, Human
ggugguuccccuugccguucaugga

SEQ ID NO: 1375197 - RNA, 19 nt, Human
guccccauccuccucucca

SEQ ID NO: 1375198 - RNA, 20 nt, Human
gucgucuuucaucuggggga

SEQ ID NO: 1375199 - RNA, 23 nt, Human
gugcaugaucaugggggagguac

SEQ ID NO: 1375200 - RNA, 21 nt, Human
guuucuagcagccuuuaagcu

SEQ ID NO: 1375201 - RNA, 21 nt, Human
uaaaaugucacaauuuguguc

SEQ ID NO: 1375202 - RNA, 19 nt, Human
uaaacgacuuucaggagcc

SEQ ID NO: 1375203 - RNA, 23 nt, Human
uaacaguagcuuuaaugaauuaa

SEQ ID NO: 1375204 - RNA, 24 nt, Human
uaagaacuaaaucccugggccucc

SEQ ID NO: 1375205 - RNA, 20 nt, Human
uaagcuccaaaguaugaagg

SEQ ID NO: 1375206 - RNA, 18 nt, Human
uaagggggugcacuggga

SEQ ID NO: 1375207 - RNA, 24 nt, Human
uacaacuccacuggaugaucccuu

SEQ ID NO: 1375208 - RNA, 23 nt, Human
uacagccaugguaucaauccacc

SEQ ID NO: 1375209 - RNA, 22 nt, Human
uacagugcuacaacugcagaau

SEQ ID NO: 1375210 - RNA, 20 nt, Human
uagaaaaacauaaagaugaa

SEQ ID NO: 1375211 - RNA, 19 nt, Human
uagccagcagcucccuaga

SEQ ID NO: 1375212 - RNA, 20 nt, Human
uagcucuacccccauccccu

SEQ ID NO: 1375213 - RNA, 21 nt, Human
uaggagaugcuccaugcucac

SEQ ID NO: 1375214 - RNA, 21 nt, Human
uauccaacagagaacagggag

SEQ ID NO: 1375215 - RNA, 24 nt, Human
uauuauguaaaccuuaacauaaga

SEQ ID NO: 1375216 - RNA, 23 nt, Human
ucaaacaccuacuucaaaaugac

SEQ ID NO: 1375217 - RNA, 19 nt, Human
ucaaccagguuguaacaaa

SEQ ID NO: 1375218 - RNA, 20 nt, Human
ucagaaaaggugcaggucau

SEQ ID NO: 1375219 - RNA, 20 nt, Human
ucagccacaauucugcuagg

SEQ ID NO: 1375220 - RNA, 23 nt, Human
ucaguccauuagggcucucuauu

SEQ ID NO: 1375221 - RNA, 20 nt, Human
ucauuuuaagccacugaguu

SEQ ID NO: 1375222 - RNA, 20 nt, Human
uccaaaguaugaagcagggc

SEQ ID NO: 1375223 - RNA, 22 nt, Human
uccaaccuggauugugaucacu

SEQ ID NO: 1375224 - RNA, 18 nt, Human
uccaaggcccuugagagg

SEQ ID NO: 1375225 - RNA, 19 nt, Human
ucccaggaauccaaggccc

SEQ ID NO: 1375226 - RNA, 21 nt, Human
uccccauguggcucccaggaa

SEQ ID NO: 1375227 - RNA, 19 nt, Human
ucccuccccuuccucuucc

SEQ ID NO: 1375228 - RNA, 24 nt, Human
ucccugaaagugucuuccuucacc

SEQ ID NO: 1375229 - RNA, 18 nt, Human
uccucagguucugcugug

SEQ ID NO: 1375230 - RNA, 18 nt, Human
ucuaaaaacagcaaauau

SEQ ID NO: 1375231 - RNA, 19 nt, Human
ucuaaaaugccuugccagc

SEQ ID NO: 1375232 - RNA, 21 nt, Human
ucuaugggauuccaaagggaa

SEQ ID NO: 1375233 - RNA, 21 nt, Human
ucucucaaggagagacaccuc

SEQ ID NO: 1375234 - RNA, 18 nt, Human
ucucugaguaggggaggg

SEQ ID NO: 1375235 - RNA, 19 nt, Human
ucucugaguaggggagggg

SEQ ID NO: 1375236 - RNA, 21 nt, Human
ucuuccucccagcaaagggug

SEQ ID NO: 1375237 - RNA, 21 nt, Human
ugaaaccugggcaugaggcug

SEQ ID NO: 1375238 - RNA, 21 nt, Human
ugaacuuucuuggcacagaaa

SEQ ID NO: 1375239 - RNA, 18 nt, Human
ugaagcagggccaagggc

SEQ ID NO: 1375240 - RNA, 18 nt, Human
ugaagcagggccaagggc

SEQ ID NO: 1375241 - RNA, 21 nt, Human
ugaccuccaggguagcuaccc

SEQ ID NO: 1375242 - RNA, 21 nt, Human
ugacugcaggguccgcaccuc

SEQ ID NO: 1375243 - RNA, 20 nt, Human
ugagaaugagaggagauggu

SEQ ID NO: 1375244 - RNA, 18 nt, Human
ugagugaucucagccuuc

SEQ ID NO: 1375245 - RNA, 18 nt, Human
ugaguugaagcaguucca

SEQ ID NO: 1375246 - RNA, 21 nt, Human
ugaucagacccaguccacauc

SEQ ID NO: 1375247 - RNA, 21 nt, Human
ugaugugagcucacuggagga

SEQ ID NO: 1375248 - RNA, 22 nt, Human
ugccaaggcagagucaagacaa

SEQ ID NO: 1375249 - RNA, 21 nt, Human
ugccguucauggagaccagcg

SEQ ID NO: 1375250 - RNA, 18 nt, Human
ugcuacaacugcagaauu

SEQ ID NO: 1375251 - RNA, 19 nt, Human
ugcuuugggggcagguguc

SEQ ID NO: 1375252 - RNA, 19 nt, Human
uggaauuucagauaaacca

SEQ ID NO: 1375253 - RNA, 18 nt, Human
uggaggaggagcccuggg

SEQ ID NO: 1375254 - RNA, 23 nt, Human
uggaggaggagcccugggggcug

SEQ ID NO: 1375255 - RNA, 20 nt, Human
uggaugugaagauggcuacc

SEQ ID NO: 1375256 - RNA, 22 nt, Human
uggcggagaagguucugucuca

SEQ ID NO: 1375257 - RNA, 22 nt, Human
uggcuacacccuuacuucuauu

SEQ ID NO: 1375258 - RNA, 18 nt, Human
ugggaggaacagaggacu

SEQ ID NO: 1375259 - RNA, 21 nt, Human
ugggcccaagggaaugucaca

SEQ ID NO: 1375260 - RNA, 27 nt, Human
ugggcgcccccuagugggggggacacc

SEQ ID NO: 1375261 - RNA, 21 nt, Human
uggggaugguccccauguggc

SEQ ID NO: 1375262 - RNA, 22 nt, Human
ugggguuaccaucgcuccucca

SEQ ID NO: 1375263 - RNA, 24 nt, Human
ugguucccuuguuuacaacuccac

SEQ ID NO: 1375264 - RNA, 25 nt, Human
uguggcucccaggaacaugcucuca

SEQ ID NO: 1375265 - RNA, 22 nt, Human
uuaaugcacaauauuuugaaaa

SEQ ID NO: 1375266 - RNA, 18 nt, Human
uucacuucucuauagaaa

SEQ ID NO: 1375267 - RNA, 21 nt, Human
uucauggagaccagcggcaga

SEQ ID NO: 1375268 - RNA, 20 nt, Human
uuccaaagggaaggcuucgg

SEQ ID NO: 1375269 - RNA, 21 nt, Human
uuccaaagggaaggcuucggg

SEQ ID NO: 1375270 - RNA, 24 nt, Human
uuccucucugaguaggggaggggg

SEQ ID NO: 1375271 - RNA, 24 nt, Human
uuccugccucaguccauuagggcu

SEQ ID NO: 1375272 - RNA, 20 nt, Human
uugcaagggcauccucuguc

SEQ ID NO: 1375273 - RNA, 22 nt, Human
uuucaggagccucugguuuuua

SEQ ID NO: 1375274 - RNA, 20 nt, Human
uuucuccucagguucugcug

SEQ ID NO: 1375275 - RNA, 18 nt, Human
uuugaggggaaguggggg

SEQ ID NO: 1375276 - RNA, 18 nt, Human
uuuguugccugaaguuca

SEQ ID NO: 1375277 - RNA, 31 nt, Human
aaacaacaauaaauauguaucaucuugcacc

SEQ ID NO: 1375278 - RNA, 24 nt, Human
aaagugcugggauuauagguguga

SEQ ID NO: 1375279 - RNA, 22 nt, Human
aaaucaacauuagcuuugcuag

SEQ ID NO: 1375280 - RNA, 21 nt, Human
aagccccccaggagcucuagg

SEQ ID NO: 1375281 - RNA, 18 nt, Human
aaggacaggcccaggggc

SEQ ID NO: 1375282 - RNA, 18 nt, Human
aagugcugggauuauagg

SEQ ID NO: 1375283 - RNA, 26 nt, Human
aagugcugggauuauaggugugagcc

SEQ ID NO: 1375284 - RNA, 23 nt, Human
aauaaucugcauuucuccuucag

SEQ ID NO: 1375285 - RNA, 23 nt, Human
acacaacccuuccuggugccacc

SEQ ID NO: 1375286 - RNA, 21 nt, Human
acaggcaccugccaccaugcc

SEQ ID NO: 1375287 - RNA, 20 nt, Human
accacacuuuagcucccagg

SEQ ID NO: 1375288 - RNA, 22 nt, Human
accagugccucccucugacagg

SEQ ID NO: 1375289 - RNA, 18 nt, Human
acccuaguguuuccaagc

SEQ ID NO: 1375290 - RNA, 25 nt, Human
accguggggccucuuccccagcccu

SEQ ID NO: 1375291 - RNA, 23 nt, Human
accucggccucccaaagugcugg

SEQ ID NO: 1375292 - RNA, 20 nt, Human
acggcacagagcaggcaggc

SEQ ID NO: 1375293 - RNA, 18 nt, Human
acucugucacccaggcug

SEQ ID NO: 1375294 - RNA, 25 nt, Human
acucugucacccaggcuggagugca

SEQ ID NO: 1375295 - RNA, 19 nt, Human
acuuguucaucaugcuuca

SEQ ID NO: 1375296 - RNA, 27 nt, Human
agaaggacaggcccaggggcauacaga

SEQ ID NO: 1375297 - RNA, 24 nt, Human
agcaccuacgacagagccugcaua

SEQ ID NO: 1375298 - RNA, 18 nt, Human
agcaugaauaccugcaga

SEQ ID NO: 1375299 - RNA, 19 nt, Human
agccggggcugguggggcc

SEQ ID NO: 1375300 - RNA, 23 nt, Human
agccuuaggccucugggcagcca

SEQ ID NO: 1375301 - RNA, 18 nt, Human
agcucccagcuuggauga

SEQ ID NO: 1375302 - RNA, 19 nt, Human
aggaaaaggagaauaucca

SEQ ID NO: 1375303 - RNA, 22 nt, Human
aggagagauaggguuucgccau

SEQ ID NO: 1375304 - RNA, 23 nt, Human
aggaggaagggagcaggccagaa

SEQ ID NO: 1375305 - RNA, 22 nt, Human
aggcagaaggacaggcccaggg

SEQ ID NO: 1375306 - RNA, 25 nt, Human
aggcuggagugcaguagugcaaucu

SEQ ID NO: 1375307 - RNA, 21 nt, Human
agggagccaaggaggaaggga

SEQ ID NO: 1375308 - RNA, 22 nt, Human
aggguuucgccauguuggccag

SEQ ID NO: 1375309 - RNA, 24 nt, Human
aggugauccacucaccucggccuc

SEQ ID NO: 1375310 - RNA, 20 nt, Human
aggugugagccaccucgucc

SEQ ID NO: 1375311 - RNA, 21 nt, Human
agguuuggggacucagccugu

SEQ ID NO: 1375312 - RNA, 21 nt, Human
aguaguugggauuacaggcac

SEQ ID NO: 1375313 - RNA, 23 nt, Human
agugcaguagugcaaucuugguu

SEQ ID NO: 1375314 - RNA, 23 nt, Human
agugcaguagugcaaucuugguu

SEQ ID NO: 1375315 - RNA, 24 nt, Human
agugcaguagugcaaucuugguuu

SEQ ID NO: 1375316 - RNA, 20 nt, Human
agugguccuggacuaacuga

SEQ ID NO: 1375317 - RNA, 22 nt, Human
auagagccuguggagucagacu

SEQ ID NO: 1375318 - RNA, 18 nt, Human
auaggguuucgccauguu

SEQ ID NO: 1375319 - RNA, 23 nt, Human
auaggguuucgccauguuggcca

SEQ ID NO: 1375320 - RNA, 24 nt, Human
auaggguuucgccauguuggccag

SEQ ID NO: 1375321 - RNA, 20 nt, Human
aucugaaggcucaacugggg

SEQ ID NO: 1375322 - RNA, 19 nt, Human
augaauaccugcagacauc

SEQ ID NO: 1375323 - RNA, 22 nt, Human
augacuucucuccuccaauccu

SEQ ID NO: 1375324 - RNA, 19 nt, Human
auggagccuugugagccgg

SEQ ID NO: 1375325 - RNA, 24 nt, Human
caaagugcugggauuauaggugug

SEQ ID NO: 1375326 - RNA, 19 nt, Human
caacagggcaacccuauuc

SEQ ID NO: 1375327 - RNA, 24 nt, Human
caacuugaauccccccagcaccua

SEQ ID NO: 1375328 - RNA, 21 nt, Human
caagagacaaugcagaaguac

SEQ ID NO: 1375329 - RNA, 21 nt, Human
caagccccccaggagcucuag

SEQ ID NO: 1375330 - RNA, 23 nt, Human
cacacaacccuuccuggugccac

SEQ ID NO: 1375331 - RNA, 22 nt, Human
cacagacuguaggugcuccuga

SEQ ID NO: 1375332 - RNA, 20 nt, Human
cacaguuagcuccauggaaa

SEQ ID NO: 1375333 - RNA, 24 nt, Human
caccagcuuggggucuagcccacg

SEQ ID NO: 1375334 - RNA, 24 nt, Human
caccaugcccggcuaauuuuugua

SEQ ID NO: 1375335 - RNA, 19 nt, Human
cacccccaccagaucccac

SEQ ID NO: 1375336 - RNA, 23 nt, Human
cacccccaccagaucccacacca

SEQ ID NO: 1375337 - RNA, 23 nt, Human
cacggcacagagcaggcaggcuc

SEQ ID NO: 1375338 - RNA, 20 nt, Human
cacuagaaguucagcaacuu

SEQ ID NO: 1375339 - RNA, 22 nt, Human
cacucgcccuguccccccagcu

SEQ ID NO: 1375340 - RNA, 23 nt, Human
cacucugucacccaggcuggagu

SEQ ID NO: 1375341 - RNA, 24 nt, Human
cacucugucacccaggcuggagug

SEQ ID NO: 1375342 - RNA, 18 nt, Human
cagaaagggccuugccuu

SEQ ID NO: 1375343 - RNA, 24 nt, Human
cagaaagggccuugccuugcagca

SEQ ID NO: 1375344 - RNA, 22 nt, Human
cagaaggacaggcccaggggca

SEQ ID NO: 1375345 - RNA, 27 nt, Human
cagaccccaacaauggagccuugugag

SEQ ID NO: 1375346 - RNA, 18 nt, Human
cagaguuaggaaaaggag

SEQ ID NO: 1375347 - RNA, 18 nt, Human
cagauguucacagcucuc

SEQ ID NO: 1375348 - RNA, 25 nt, Human
cagcaggacaugcccgggaugcuug

SEQ ID NO: 1375349 - RNA, 28 nt, Human
cagcaggcuggccuccuuucccccuggg

SEQ ID NO: 1375350 - RNA, 20 nt, Human
cagccuccugaguaguuggg

SEQ ID NO: 1375351 - RNA, 19 nt, Human
cagccuccugguaauaauc

SEQ ID NO: 1375352 - RNA, 21 nt, Human
cagcucccucagcugaugccc

SEQ ID NO: 1375353 - RNA, 18 nt, Human
cagcuuggggucuagccc

SEQ ID NO: 1375354 - RNA, 22 nt, Human
caggagccagggagccaaggag

SEQ ID NO: 1375355 - RNA, 19 nt, Human
caggcagaaggacaggccc

SEQ ID NO: 1375356 - RNA, 25 nt, Human
cagucagacaaaauuccucucucag

SEQ ID NO: 1375357 - RNA, 22 nt, Human
cagugugcuggaggagccgcgg

SEQ ID NO: 1375358 - RNA, 19 nt, Human
cauggaacuuucuguagga

SEQ ID NO: 1375359 - RNA, 24 nt, Human
cauguuggccaggcuggucuugaa

SEQ ID NO: 1375360 - RNA, 22 nt, Human
cauuucugcuucuccuucuugu

SEQ ID NO: 1375361 - RNA, 20 nt, Human
cauuucuuuucuccugccug

SEQ ID NO: 1375362 - RNA, 21 nt, Human
ccaaagugcugggauuauagg

SEQ ID NO: 1375363 - RNA, 24 nt, Human
ccaaagugcugggauuauaggugu

SEQ ID NO: 1375364 - RNA, 22 nt, Human
ccaacccucaugguccccagau

SEQ ID NO: 1375365 - RNA, 25 nt, Human
ccaagccccccaggagccggguguc

SEQ ID NO: 1375366 - RNA, 19 nt, Human
ccacacuuuagcucccagc

SEQ ID NO: 1375367 - RNA, 22 nt, Human
ccaccagaucccacaccaaccc

SEQ ID NO: 1375368 - RNA, 22 nt, Human
ccaccuuaugcacagggaggca

SEQ ID NO: 1375369 - RNA, 21 nt, Human
ccacgguuaaacauugacuua

SEQ ID NO: 1375370 - RNA, 23 nt, Human
ccagaaccguggggccucuuccc

SEQ ID NO: 1375371 - RNA, 19 nt, Human
ccauguuggccaggcuggu

SEQ ID NO: 1375372 - RNA, 18 nt, Human
cccaacccugccuucagc

SEQ ID NO: 1375373 - RNA, 24 nt, Human
cccaaggacucccuguauccugcc

SEQ ID NO: 1375374 - RNA, 20 nt, Human
cccaauccuagccuacagcc

SEQ ID NO: 1375375 - RNA, 21 nt, Human
cccacacugcuuucuaggcca

SEQ ID NO: 1375376 - RNA, 18 nt, Human
cccagcccuugacacucc

SEQ ID NO: 1375377 - RNA, 22 nt, Human
cccagcccuugacacucccaac

SEQ ID NO: 1375378 - RNA, 24 nt, Human
ccccagauggacuuaggaugacuc

SEQ ID NO: 1375379 - RNA, 22 nt, Human
ccccagcaccuacgacagagcc

SEQ ID NO: 1375380 - RNA, 19 nt, Human
ccccaggagcucuaggacc

SEQ ID NO: 1375381 - RNA, 20 nt, Human
ccccaggagcucuaggaccc

SEQ ID NO: 1375382 - RNA, 21 nt, Human
ccccaggagcucuaggacccu

SEQ ID NO: 1375383 - RNA, 26 nt, Human
cccccagcaccuacgacagagccugc

SEQ ID NO: 1375384 - RNA, 18 nt, Human
ccccgccuucccucuguc

SEQ ID NO: 1375385 - RNA, 18 nt, Human
ccccgggggugugcuggg

SEQ ID NO: 1375386 - RNA, 20 nt, Human
ccccuguaauugcauguccc

SEQ ID NO: 1375387 - RNA, 19 nt, Human
cccuacccucacagcaggc

SEQ ID NO: 1375388 - RNA, 18 nt, Human
cccucugccucuggccuc

SEQ ID NO: 1375389 - RNA, 19 nt, Human
ccuagaccacccccaccag

SEQ ID NO: 1375390 - RNA, 19 nt, Human
ccucccagugguccuggac

SEQ ID NO: 1375391 - RNA, 22 nt, Human
ccucguccggcccaaacugaca

SEQ ID NO: 1375392 - RNA, 26 nt, Human
ccucugccuaccucccacucucccua

SEQ ID NO: 1375393 - RNA, 20 nt, Human
ccucugggcagccauggcuc

SEQ ID NO: 1375394 - RNA, 28 nt, Human
ccucugggcagccauggcuccagccacu

SEQ ID NO: 1375395 - RNA, 24 nt, Human
ccugaccucaggugauccacucac

SEQ ID NO: 1375396 - RNA, 18 nt, Human
ccugagaggcccccagag

SEQ ID NO: 1375397 - RNA, 23 nt, Human
ccugaguaguugggauuacaggc

SEQ ID NO: 1375398 - RNA, 24 nt, Human
ccugaguaguugggauuacaggca

SEQ ID NO: 1375399 - RNA, 23 nt, Human
ccugaguucaagcaauuuuccug

SEQ ID NO: 1375400 - RNA, 22 nt, Human
ccugcaugacuucucuccucca

SEQ ID NO: 1375401 - RNA, 18 nt, Human
ccuggccugucucuucuc

SEQ ID NO: 1375402 - RNA, 21 nt, Human
ccugucucuucucgucuuccc

SEQ ID NO: 1375403 - RNA, 19 nt, Human
cgacagagccugcauauuu

SEQ ID NO: 1375404 - RNA, 22 nt, Human
cgccauguuggccaggcugguc

SEQ ID NO: 1375405 - RNA, 24 nt, Human
cgccauguuggccaggcuggucuu

SEQ ID NO: 1375406 - RNA, 19 nt, Human
cuagaccacccccaccaga

SEQ ID NO: 1375407 - RNA, 22 nt, Human
cuagaccacccccaccagaucc

SEQ ID NO: 1375408 - RNA, 24 nt, Human
cuagcugccucuucggauuucucc

SEQ ID NO: 1375409 - RNA, 20 nt, Human
cucacagcaggcuggccucc

SEQ ID NO: 1375410 - RNA, 21 nt, Human
cucacucgcccugucccccca

SEQ ID NO: 1375411 - RNA, 24 nt, Human
cucacucugucacccaggcuggag

SEQ ID NO: 1375412 - RNA, 21 nt, Human
cuccaauccucuauuuaacca

SEQ ID NO: 1375413 - RNA, 21 nt, Human
cucccaacccugccuucagcu

SEQ ID NO: 1375414 - RNA, 19 nt, Human
cucccagagcugccguccc

SEQ ID NO: 1375415 - RNA, 24 nt, Human
cuccccagaugcacaguuagccga

SEQ ID NO: 1375416 - RNA, 24 nt, Human
cuccugccaccaagcccuugccag

SEQ ID NO: 1375417 - RNA, 18 nt, Human
cuccuucuugucuuccuc

SEQ ID NO: 1375418 - RNA, 18 nt, Human
cucucccuagcugccucu

SEQ ID NO: 1375419 - RNA, 18 nt, Human
cucucucuucugcacccc

SEQ ID NO: 1375420 - RNA, 22 nt, Human
cucugccuaccucccacucucc

SEQ ID NO: 1375421 - RNA, 18 nt, Human
cucugugcuaacuagccc

SEQ ID NO: 1375422 - RNA, 23 nt, Human
cugaacuagugaucugagagaca

SEQ ID NO: 1375423 - RNA, 18 nt, Human
cugcaccccucugccucu

SEQ ID NO: 1375424 - RNA, 21 nt, Human
cugcagugcuuucucuuuuaa

SEQ ID NO: 1375425 - RNA, 23 nt, Human
cugcagugcuuucucuuuuaauc

SEQ ID NO: 1375426 - RNA, 27 nt, Human
cugccuccugaguucaagcaauuuuuu

SEQ ID NO: 1375427 - RNA, 24 nt, Human
cuggcccugcacuuauuagcuggg

SEQ ID NO: 1375428 - RNA, 21 nt, Human
cuggcccugcccuccucccca

SEQ ID NO: 1375429 - RNA, 21 nt, Human
cugggauuauaggugugagcc

SEQ ID NO: 1375430 - RNA, 21 nt, Human
cugggcagccauggcuccagc

SEQ ID NO: 1375431 - RNA, 20 nt, Human
cugguggagaaggagcuggg

SEQ ID NO: 1375432 - RNA, 23 nt, Human
cugguggagaaggagcugggauu

SEQ ID NO: 1375433 - RNA, 21 nt, Human
cugucgcagccuccugaguag

SEQ ID NO: 1375434 - RNA, 19 nt, Human
cuuccaccugauaagaaug

SEQ ID NO: 1375435 - RNA, 19 nt, Human
cuucuccuucuugucuucc

SEQ ID NO: 1375436 - RNA, 18 nt, Human
cuugagcauccuuaugac

SEQ ID NO: 1375437 - RNA, 24 nt, Human
cuugcaagauggcgcacucacaug

SEQ ID NO: 1375438 - RNA, 18 nt, Human
cuuucuaggccacuugua

SEQ ID NO: 1375439 - RNA, 18 nt, Human
gaaauggaagguggggug

SEQ ID NO: 1375440 - RNA, 20 nt, Human
gaaggugggguggaggaagc

SEQ ID NO: 1375441 - RNA, 24 nt, Human
gaccucaggugauccacucaccuc

SEQ ID NO: 1375442 - RNA, 19 nt, Human
gacuguaacccaacccccu

SEQ ID NO: 1375443 - RNA, 18 nt, Human
gacuuagggugcuggggg

SEQ ID NO: 1375444 - RNA, 19 nt, Human
gagaaagccacggcacaga

SEQ ID NO: 1375445 - RNA, 22 nt, Human
gagagauaggguuucgccaugu

SEQ ID NO: 1375446 - RNA, 21 nt, Human
gagcucuaggacccugcccaa

SEQ ID NO: 1375447 - RNA, 25 nt, Human
gaguaguugggauuacaggcaccug

SEQ ID NO: 1375448 - RNA, 24 nt, Human
gauuacaggcaccugccaccaugc

SEQ ID NO: 1375449 - RNA, 18 nt, Human
gauuauaggugugagcca

SEQ ID NO: 1375450 - RNA, 20 nt, Human
gauuauaggugugagccacc

SEQ ID NO: 1375451 - RNA, 24 nt, Human
gauuauaggugugagccaccucgu

SEQ ID NO: 1375452 - RNA, 18 nt, Human
gauucacacccagccucc

SEQ ID NO: 1375453 - RNA, 24 nt, Human
gccauguuggccaggcuggucuug

SEQ ID NO: 1375454 - RNA, 22 nt, Human
gcccggcuaauuuuuguauuuu

SEQ ID NO: 1375455 - RNA, 21 nt, Human
gcccuugacacucccaacccu

SEQ ID NO: 1375456 - RNA, 21 nt, Human
gccuaccucccacucucccua

SEQ ID NO: 1375457 - RNA, 21 nt, Human
gccucagagccagggcuucug

SEQ ID NO: 1375458 - RNA, 24 nt, Human
gccucuucggauuucuccaaccuu

SEQ ID NO: 1375459 - RNA, 22 nt, Human
gcucaacuggggcuggaagagc

SEQ ID NO: 1375460 - RNA, 22 nt, Human
gcucagccggggcugguggggc

SEQ ID NO: 1375461 - RNA, 19 nt, Human
gcucccucagcugaugccc

SEQ ID NO: 1375462 - RNA, 19 nt, Human
gcucccucagcugaugccc

SEQ ID NO: 1375463 - RNA, 21 nt, Human
gcuggaggagccgcgggccug

SEQ ID NO: 1375464 - RNA, 20 nt, Human
gcuggccuccuuucucuccc

SEQ ID NO: 1375465 - RNA, 20 nt, Human
gcuucuccuucuugucuucc

SEQ ID NO: 1375466 - RNA, 18 nt, Human
ggacgugacccuacccuc

SEQ ID NO: 1375467 - RNA, 21 nt, Human
ggagcaggccagaagggugcu

SEQ ID NO: 1375468 - RNA, 19 nt, Human
ggagcugggauucacaccc

SEQ ID NO: 1375469 - RNA, 22 nt, Human
ggagcugggauucacacccagc

SEQ ID NO: 1375470 - RNA, 25 nt, Human
ggcagucaucacagacuguaggugc

SEQ ID NO: 1375471 - RNA, 26 nt, Human
ggccucagagccagggcuucuguggu

SEQ ID NO: 1375472 - RNA, 21 nt, Human
ggccuggccugucucuucucg

SEQ ID NO: 1375473 - RNA, 24 nt, Human
ggcuggucuugaauuccugaccuc

SEQ ID NO: 1375474 - RNA, 20 nt, Human
gggcugcagucaucugaagg

SEQ ID NO: 1375475 - RNA, 23 nt, Human
gggcugguggggccgccccucuu

SEQ ID NO: 1375476 - RNA, 18 nt, Human
gggggucagcucagccgg

SEQ ID NO: 1375477 - RNA, 21 nt, Human
ggguuucgccauguuggccag

SEQ ID NO: 1375478 - RNA, 22 nt, Human
ggguuucgccauguuggccagg

SEQ ID NO: 1375479 - RNA, 19 nt, Human
ggucuugaauuccugaccu

SEQ ID NO: 1375480 - RNA, 24 nt, Human
gguuuggggacucagccugugcua

SEQ ID NO: 1375481 - RNA, 18 nt, Human
guaguugggauuacaggc

SEQ ID NO: 1375482 - RNA, 24 nt, Human
gugauccacucaccucggccuccc

SEQ ID NO: 1375483 - RNA, 22 nt, Human
gugcuuguguggggugaggugc

SEQ ID NO: 1375484 - RNA, 20 nt, Human
gugguccuggacuaacugag

SEQ ID NO: 1375485 - RNA, 26 nt, Human
guggugugccggccccucaugcuggg

SEQ ID NO: 1375486 - RNA, 21 nt, Human
guguacacuggguuuuacaua

SEQ ID NO: 1375487 - RNA, 22 nt, Human
guuaggaaaaggagaauaucca

SEQ ID NO: 1375488 - RNA, 28 nt, Human
uaauauuucuuccuuuuuuuuuuucucu

SEQ ID NO: 1375489 - RNA, 18 nt, Human
uaaucugcauuucuccuu

SEQ ID NO: 1375490 - RNA, 23 nt, Human
uacaggcaccugccaccaugccc

SEQ ID NO: 1375491 - RNA, 20 nt, Human
uacccucacagcaggcuggc

SEQ ID NO: 1375492 - RNA, 18 nt, Human
uacgacagagccugcaua

SEQ ID NO: 1375493 - RNA, 19 nt, Human
uagaacauuccugggcuca

SEQ ID NO: 1375494 - RNA, 22 nt, Human
uagaccacccccaccagauccc

SEQ ID NO: 1375495 - RNA, 18 nt, Human
uagcuccauggaaagggc

SEQ ID NO: 1375496 - RNA, 21 nt, Human
uagcugccucuucggauuucu

SEQ ID NO: 1375497 - RNA, 24 nt, Human
uaggagagauaggguuucgccaug

SEQ ID NO: 1375498 - RNA, 22 nt, Human
uaggaugacucuuucuccccag

SEQ ID NO: 1375499 - RNA, 23 nt, Human
uaggccucugggcagccauggcu

SEQ ID NO: 1375500 - RNA, 24 nt, Human
uaggguuucgccauguuggccagg

SEQ ID NO: 1375501 - RNA, 18 nt, Human
uagugcugguugccggca

SEQ ID NO: 1375502 - RNA, 18 nt, Human
uaguugggauuacaggca

SEQ ID NO: 1375503 - RNA, 20 nt, Human
uaugccugguuuccacuccc

SEQ ID NO: 1375504 - RNA, 20 nt, Human
uauuccaacguuucaacagg

SEQ ID NO: 1375505 - RNA, 24 nt, Human
uauuucuuccuuuuuuuuuuucuc

SEQ ID NO: 1375506 - RNA, 26 nt, Human
ucaaaaagaaucauuucuuuucuccu

SEQ ID NO: 1375507 - RNA, 18 nt, Human
ucaaaacagcagcuccua

SEQ ID NO: 1375508 - RNA, 24 nt, Human
ucacccaggcuggagugcaguagu

SEQ ID NO: 1375509 - RNA, 24 nt, Human
ucacucugucacccaggcuggagu

SEQ ID NO: 1375510 - RNA, 18 nt, Human
ucagcucauuucuuccaa

SEQ ID NO: 1375511 - RNA, 18 nt, Human
ucagguccucucccuccu

SEQ ID NO: 1375512 - RNA, 20 nt, Human
ucaggugauccacucaccuc

SEQ ID NO: 1375513 - RNA, 23 nt, Human
ucccaaagugcugggauuauagg

SEQ ID NO: 1375514 - RNA, 22 nt, Human
uccccagaugcacaguuagcuc

SEQ ID NO: 1375515 - RNA, 21 nt, Human
ucccucagcugaugcccugcu

SEQ ID NO: 1375516 - RNA, 18 nt, Human
ucccucuuuguugccucu

SEQ ID NO: 1375517 - RNA, 24 nt, Human
uccugaguaguugggauuacaggc

SEQ ID NO: 1375518 - RNA, 21 nt, Human
uccugaguucaagcaauuuuc

SEQ ID NO: 1375519 - RNA, 24 nt, Human
uccugaguucaagcaauuuuccug

SEQ ID NO: 1375520 - RNA, 18 nt, Human
uccuugggccuggccugu

SEQ ID NO: 1375521 - RNA, 22 nt, Human
ucgccauguuggccaggcuggu

SEQ ID NO: 1375522 - RNA, 24 nt, Human
ucgccauguuggccaggcuggucu

SEQ ID NO: 1375523 - RNA, 18 nt, Human
ucggccucccaaagugcu

SEQ ID NO: 1375524 - RNA, 21 nt, Human
ucuagcccacguuuaccacac

SEQ ID NO: 1375525 - RNA, 22 nt, Human
ucucacucugucacccaggcug

SEQ ID NO: 1375526 - RNA, 23 nt, Human
ucucacucugucacccaggcugg

SEQ ID NO: 1375527 - RNA, 24 nt, Human
ucucacucugucacccaggcugga

SEQ ID NO: 1375528 - RNA, 26 nt, Human
ucucacucugucacccaggcuggagu

SEQ ID NO: 1375529 - RNA, 27 nt, Human
ucucacucugucacccaggcuggagug

SEQ ID NO: 1375530 - RNA, 21 nt, Human
ucucuaaaucaacauuagcuu

SEQ ID NO: 1375531 - RNA, 24 nt, Human
ucugcaccccucugccucuggccu

SEQ ID NO: 1375532 - RNA, 24 nt, Human
ucugucacccaggcuggagugcag

SEQ ID NO: 1375533 - RNA, 21 nt, Human
ugacagggcggggggucagcu

SEQ ID NO: 1375534 - RNA, 19 nt, Human
ugaccucaggugauccacu

SEQ ID NO: 1375535 - RNA, 20 nt, Human
ugaccucaggugauccacuc

SEQ ID NO: 1375536 - RNA, 21 nt, Human
ugacucuuucuccccagaugc

SEQ ID NO: 1375537 - RNA, 22 nt, Human
ugagaaagccacggcacagagc

SEQ ID NO: 1375538 - RNA, 19 nt, Human
ugagcacacacacaacccu

SEQ ID NO: 1375539 - RNA, 30 nt, Human
ugaguaccucucacuguguaacaaauuucu

SEQ ID NO: 1375540 - RNA, 21 nt, Human
ugagucucacucugucaccca

SEQ ID NO: 1375541 - RNA, 21 nt, Human
ugaguucaagcaauuuuccug

SEQ ID NO: 1375542 - RNA, 24 nt, Human
ugauccacucaccucggccuccca

SEQ ID NO: 1375543 - RNA, 22 nt, Human
ugccaguggugggacuguaacc

SEQ ID NO: 1375544 - RNA, 22 nt, Human
ugcccaggcaaaggggcucugc

SEQ ID NO: 1375545 - RNA, 24 nt, Human
ugcccggcuaauuuuuguauuuuu

SEQ ID NO: 1375546 - RNA, 18 nt, Human
ugcccugcuuccauuccc

SEQ ID NO: 1375547 - RNA, 21 nt, Human
ugcgcaacaggaggccccaug

SEQ ID NO: 1375548 - RNA, 19 nt, Human
ugcucucucuucugcaccc

SEQ ID NO: 1375549 - RNA, 20 nt, Human
ugcuggaggagccgcgggcc

SEQ ID NO: 1375550 - RNA, 19 nt, Human
ugcuggggaaagaggggac

SEQ ID NO: 1375551 - RNA, 24 nt, Human
ugcuucagguuaagggucacaggc

SEQ ID NO: 1375552 - RNA, 19 nt, Human
uggaaggugggguggagga

SEQ ID NO: 1375553 - RNA, 23 nt, Human
uggaaggugggguggaggaagca

SEQ ID NO: 1375554 - RNA, 21 nt, Human
uggaggaagcagguggcuuua

SEQ ID NO: 1375555 - RNA, 24 nt, Human
uggagugcaguagugcaaucuugg

SEQ ID NO: 1375556 - RNA, 21 nt, Human
uggcaagccacuuucuuaaca

SEQ ID NO: 1375557 - RNA, 22 nt, Human
uggcaagccacuuucuuaacau

SEQ ID NO: 1375558 - RNA, 19 nt, Human
uggcagcugcccucuaugu

SEQ ID NO: 1375559 - RNA, 24 nt, Human
uggccaggcuggucuugaauuccu

SEQ ID NO: 1375560 - RNA, 23 nt, Human
uggcuuccccugaacuagugauc

SEQ ID NO: 1375561 - RNA, 21 nt, Human
ugggagaagcuuagccagagg

SEQ ID NO: 1375562 - RNA, 21 nt, Human
ugggauuacaggcaccugcca

SEQ ID NO: 1375563 - RNA, 22 nt, Human
ugggauuacaggcaccugccac

SEQ ID NO: 1375564 - RNA, 24 nt, Human
ugggauuacaggcaccugccacca

SEQ ID NO: 1375565 - RNA, 25 nt, Human
ugggauuacaggcaccugccaccau

SEQ ID NO: 1375566 - RNA, 18 nt, Human
ugggauuauaggugugag

SEQ ID NO: 1375567 - RNA, 21 nt, Human
ugggauuauaggugugagcca

SEQ ID NO: 1375568 - RNA, 22 nt, Human
ugggauuauaggugugagccac

SEQ ID NO: 1375569 - RNA, 23 nt, Human
ugggauuauaggugugagccacc

SEQ ID NO: 1375570 - RNA, 23 nt, Human
ugggauuauaggugugagccacc

SEQ ID NO: 1375571 - RNA, 23 nt, Human
ugggauuauaggugugagccacc

SEQ ID NO: 1375572 - RNA, 25 nt, Human
ugggauuauaggugugagccaccuc

SEQ ID NO: 1375573 - RNA, 21 nt, Human
ugggauucacacccagccucc

SEQ ID NO: 1375574 - RNA, 22 nt, Human
ugggccucagagccaggacccu

SEQ ID NO: 1375575 - RNA, 21 nt, Human
uggggccgccccucuuccugu

SEQ ID NO: 1375576 - RNA, 23 nt, Human
uggggugaggugcuggcccugcc

SEQ ID NO: 1375577 - RNA, 21 nt, Human
uggggugaggugcuggcccuu

SEQ ID NO: 1375578 - RNA, 22 nt, Human
uggguuuuggcaagccacuuuc

SEQ ID NO: 1375579 - RNA, 23 nt, Human
uguaaaauggauauaauaaaagc

SEQ ID NO: 1375580 - RNA, 18 nt, Human
uguccaccacuccccucc

SEQ ID NO: 1375581 - RNA, 24 nt, Human
ugucucacucgcccugucccccca

SEQ ID NO: 1375582 - RNA, 26 nt, Human
ugucucacucgcccuguccccccagc

SEQ ID NO: 1375583 - RNA, 19 nt, Human
ugugauacugauuuccaga

SEQ ID NO: 1375584 - RNA, 22 nt, Human
ugugcugggagcccacgguuga

SEQ ID NO: 1375585 - RNA, 24 nt, Human
uuaagaugucagcuggggcugcag

SEQ ID NO: 1375586 - RNA, 24 nt, Human
uuagcagcuuaaaacaacaauaaa

SEQ ID NO: 1375587 - RNA, 24 nt, Human
uuaggagagauaggguuucgccau

SEQ ID NO: 1375588 - RNA, 23 nt, Human
uucagccuucagggccuugccug

SEQ ID NO: 1375589 - RNA, 21 nt, Human
uuccaagccccccaggagcuc

SEQ ID NO: 1375590 - RNA, 21 nt, Human
uuccaagccccccaggagcuc

SEQ ID NO: 1375591 - RNA, 22 nt, Human
uuccaagccccccaggagcucu

SEQ ID NO: 1375592 - RNA, 22 nt, Human
uugccugucuacccaagaguga

SEQ ID NO: 1375593 - RNA, 23 nt, Human
uuucgccauguuggccaggcugu

SEQ ID NO: 1375594 - RNA, 23 nt, Human
uuucugggagucauaaauuuggg

SEQ ID NO: 1375595 - RNA, 24 nt, Human
uuuggcaagccacuuucuuaacaa

SEQ ID NO: 1375596 - RNA, 22 nt, Human
uuuuacagcacacuuuaaacug

SEQ ID NO: 1375597 - RNA, 20 nt, Human
uuuuguauuuuuaggagaga

SEQ ID NO: 1375598 - RNA, 23 nt, Human
uuuuuaggagagauaggguuucg

SEQ ID NO: 1375599 - RNA, 24 nt, Human
uuuuuaggagagauaggguuucgc

SEQ ID NO: 1375600 - RNA, 18 nt, Human
uuuuuguauuuuuaggag

SEQ ID NO: 1375601 - RNA, 18 nt, Human
aaaacaggaaaaucgagg

SEQ ID NO: 1375602 - RNA, 21 nt, Human
aacaggacaacccggagucuc

SEQ ID NO: 1375603 - RNA, 21 nt, Human
aaccaguuucuucccagcccc

SEQ ID NO: 1375604 - RNA, 22 nt, Human
aaccaguuucuucccagcccca

SEQ ID NO: 1375605 - RNA, 18 nt, Human
aagcccagaaagaacagg

SEQ ID NO: 1375606 - RNA, 20 nt, Human
aaggcagacagaggggcugg

SEQ ID NO: 1375607 - RNA, 23 nt, Human
acaaaggcaaacucuaaaagcug

SEQ ID NO: 1375608 - RNA, 23 nt, Human
acacacacacacacacacacaca

SEQ ID NO: 1375609 - RNA, 23 nt, Human
acacacacacacacacacacaca

SEQ ID NO: 1375610 - RNA, 23 nt, Human
acacacacacacacacacacaca

SEQ ID NO: 1375611 - RNA, 26 nt, Human
acacacacacacacacacguauagau

SEQ ID NO: 1375612 - RNA, 25 nt, Human
acacacacacacacguauagaucac

SEQ ID NO: 1375613 - RNA, 21 nt, Human
acacggaaacaccugggggua

SEQ ID NO: 1375614 - RNA, 20 nt, Human
accagcagaggcucaggggg

SEQ ID NO: 1375615 - RNA, 20 nt, Human
accccaguacccagggcuaa

SEQ ID NO: 1375616 - RNA, 24 nt, Human
acccccaccccacgcccccagccc

SEQ ID NO: 1375617 - RNA, 29 nt, Human
accgccugcauacacacacacacacacac

SEQ ID NO: 1375618 - RNA, 20 nt, Human
accuccagaugucucauccu

SEQ ID NO: 1375619 - RNA, 23 nt, Human
accuucacaaggcagacagaggg

SEQ ID NO: 1375620 - RNA, 22 nt, Human
acguaucuguauuacuaaccca

SEQ ID NO: 1375621 - RNA, 19 nt, Human
agacacacacucaaguaca

SEQ ID NO: 1375622 - RNA, 19 nt, Human
agagagaagcaaaacagga

SEQ ID NO: 1375623 - RNA, 24 nt, Human
agaugagcaagcccagaaagaaca

SEQ ID NO: 1375624 - RNA, 19 nt, Human
agcacagaccuccaagagg

SEQ ID NO: 1375625 - RNA, 19 nt, Human
agcacccugcuugcccagg

SEQ ID NO: 1375626 - RNA, 18 nt, Human
agcuccuaaccaccccuc

SEQ ID NO: 1375627 - RNA, 18 nt, Human
aggaagaaagagggcagg

SEQ ID NO: 1375628 - RNA, 19 nt, Human
aggaggggaggagguggag

SEQ ID NO: 1375629 - RNA, 19 nt, Human
aggcagacacccccacccc

SEQ ID NO: 1375630 - RNA, 18 nt, Human
aggcauaggcugcacaca

SEQ ID NO: 1375631 - RNA, 21 nt, Human
aggccccuacaccagcaccaa

SEQ ID NO: 1375632 - RNA, 18 nt, Human
aggcgcuggggcugcucu

SEQ ID NO: 1375633 - RNA, 25 nt, Human
aggggguggcgauuccucuccuuuc

SEQ ID NO: 1375634 - RNA, 19 nt, Human
agggguggggugggacagg

SEQ ID NO: 1375635 - RNA, 24 nt, Human
agggguggggugggacaggguugg

SEQ ID NO: 1375636 - RNA, 18 nt, Human
agggucggggacuguggg

SEQ ID NO: 1375637 - RNA, 24 nt, Human
agggugguggaggagcggcccugg

SEQ ID NO: 1375638 - RNA, 23 nt, Human
aucccauccgcccucccgcuuca

SEQ ID NO: 1375639 - RNA, 24 nt, Human
augggcacacacacagccuccuac

SEQ ID NO: 1375640 - RNA, 22 nt, Human
caacgacaguagaaagcuuuua

SEQ ID NO: 1375641 - RNA, 18 nt, Human
caagcccagaaagaacag

SEQ ID NO: 1375642 - RNA, 24 nt, Human
caagugcacuaaagagggagacua

SEQ ID NO: 1375643 - RNA, 18 nt, Human
cacacacacacacacaca

SEQ ID NO: 1375644 - RNA, 20 nt, Human
cacacacacacacacacaca

SEQ ID NO: 1375645 - RNA, 20 nt, Human
cacacacacacacacacaca

SEQ ID NO: 1375646 - RNA, 20 nt, Human
cacacacacacacacacaca

SEQ ID NO: 1375647 - RNA, 20 nt, Human
cacacacacacacacacaca

SEQ ID NO: 1375648 - RNA, 20 nt, Human
cacacacacacacacacaca

SEQ ID NO: 1375649 - RNA, 20 nt, Human
cacacacacacacacacaca

SEQ ID NO: 1375650 - RNA, 20 nt, Human
cacacacacacacacacaca

SEQ ID NO: 1375651 - RNA, 22 nt, Human
cacacacacacacacacacaca

SEQ ID NO: 1375652 - RNA, 22 nt, Human
cacacacacacacacacacaca

SEQ ID NO: 1375653 - RNA, 22 nt, Human
cacacacacacacacacacaca

SEQ ID NO: 1375654 - RNA, 26 nt, Human
cacacacacacacacacacacacaca

SEQ ID NO: 1375655 - RNA, 26 nt, Human
cacacacacacacacacacacacaca

SEQ ID NO: 1375656 - RNA, 26 nt, Human
cacacacacacacacacacacacaca

SEQ ID NO: 1375657 - RNA, 26 nt, Human
cacacacacacacacacacacacacg

SEQ ID NO: 1375658 - RNA, 26 nt, Human
cacacacacacacacacacacacgua

SEQ ID NO: 1375659 - RNA, 26 nt, Human
cacacacacacacacacacacguaua

SEQ ID NO: 1375660 - RNA, 27 nt, Human
cacacacacacacacacacguauagau

SEQ ID NO: 1375661 - RNA, 28 nt, Human
cacacagacacacacucaaguacacggu

SEQ ID NO: 1375662 - RNA, 20 nt, Human
cacacgagccggacgcacac

SEQ ID NO: 1375663 - RNA, 19 nt, Human
cacacgccuccacacacac

SEQ ID NO: 1375664 - RNA, 24 nt, Human
cacagcaccagcagaggcucaggg

SEQ ID NO: 1375665 - RNA, 23 nt, Human
caccagcaccaagugaccagggu

SEQ ID NO: 1375666 - RNA, 21 nt, Human
cacggggagaggccaguccca

SEQ ID NO: 1375667 - RNA, 20 nt, Human
cacugcaugacccccucugc

SEQ ID NO: 1375668 - RNA, 22 nt, Human
cagacacauaaccgccugcaua

SEQ ID NO: 1375669 - RNA, 22 nt, Human
cagacacccccaccccacgccc

SEQ ID NO: 1375670 - RNA, 18 nt, Human
cagcacagcaccagcaga

SEQ ID NO: 1375671 - RNA, 20 nt, Human
cagccccacccaccacccca

SEQ ID NO: 1375672 - RNA, 20 nt, Human
cagcugaggcaccccuggca

SEQ ID NO: 1375673 - RNA, 21 nt, Human
cagcuuccuccuagccuggga

SEQ ID NO: 1375674 - RNA, 22 nt, Human
caggagaaucaagcaucugccg

SEQ ID NO: 1375675 - RNA, 25 nt, Human
cauacacacacacacacacacacac

SEQ ID NO: 1375676 - RNA, 25 nt, Human
cauacacaugaagagccgagugugc

SEQ ID NO: 1375677 - RNA, 21 nt, Human
caucccauccgcccucccgcu

SEQ ID NO: 1375678 - RNA, 23 nt, Human
caugaaaacucuccaguuucacc

SEQ ID NO: 1375679 - RNA, 20 nt, Human
ccaagugaccagggucacca

SEQ ID NO: 1375680 - RNA, 20 nt, Human
ccaccgugcucugagcagca

SEQ ID NO: 1375681 - RNA, 18 nt, Human
ccagcaccaagugaccag

SEQ ID NO: 1375682 - RNA, 18 nt, Human
ccagcagaggcucagggg

SEQ ID NO: 1375683 - RNA, 19 nt, Human
ccagggccuggcugugccc

SEQ ID NO: 1375684 - RNA, 23 nt, Human
cccaccucggggaacccucugga

SEQ ID NO: 1375685 - RNA, 26 nt, Human
cccagaaagaacaggacaacccggag

SEQ ID NO: 1375686 - RNA, 21 nt, Human
cccagaccucagggcugaguc

SEQ ID NO: 1375687 - RNA, 24 nt, Human
cccagccccacccaccaccccaac

SEQ ID NO: 1375688 - RNA, 20 nt, Human
cccagccccucucugucucc

SEQ ID NO: 1375689 - RNA, 23 nt, Human
cccagggcuaaggcugagaaggc

SEQ ID NO: 1375690 - RNA, 19 nt, Human
cccaugccuggcccugaga

SEQ ID NO: 1375691 - RNA, 22 nt, Human
ccccaacgacaguagaaagcuu

SEQ ID NO: 1375692 - RNA, 18 nt, Human
ccccacccaccaccccaa

SEQ ID NO: 1375693 - RNA, 20 nt, Human
ccccaccccacgcccccagc

SEQ ID NO: 1375694 - RNA, 18 nt, Human
ccccacgcccccagcccc

SEQ ID NO: 1375695 - RNA, 20 nt, Human
ccccacgcccccagccccuc

SEQ ID NO: 1375696 - RNA, 23 nt, Human
ccccguacaggggccucccaacg

SEQ ID NO: 1375697 - RNA, 19 nt, Human
cccggagucucuaaggcac

SEQ ID NO: 1375698 - RNA, 20 nt, Human
cccggccuauagcuccuaac

SEQ ID NO: 1375699 - RNA, 24 nt, Human
cccuacaccagcaccaagugacca

SEQ ID NO: 1375700 - RNA, 26 nt, Human
cccucccgcuucaagugcacuaaaga

SEQ ID NO: 1375701 - RNA, 19 nt, Human
cccucgauggcagguccca

SEQ ID NO: 1375702 - RNA, 23 nt, Human
cccuggaagggcacaggccccua

SEQ ID NO: 1375703 - RNA, 19 nt, Human
ccggagucucuaaggcacg

SEQ ID NO: 1375704 - RNA, 22 nt, Human
ccucacgcagggcagacacccc

SEQ ID NO: 1375705 - RNA, 25 nt, Human
ccucacuguggaauugggcggaggc

SEQ ID NO: 1375706 - RNA, 20 nt, Human
ccuccacacacacacucccc

SEQ ID NO: 1375707 - RNA, 22 nt, Human
ccuccacacacacacuccccag

SEQ ID NO: 1375708 - RNA, 19 nt, Human
ccucucugucuccugcacc

SEQ ID NO: 1375709 - RNA, 21 nt, Human
ccucucugucuccugcacccc

SEQ ID NO: 1375710 - RNA, 26 nt, Human
cgccugcauacacacacacacacagu

SEQ ID NO: 1375711 - RNA, 26 nt, Human
cggagucucuaaggcacgacucacac

SEQ ID NO: 1375712 - RNA, 21 nt, Human
cggcaggaauucuguuccacg

SEQ ID NO: 1375713 - RNA, 23 nt, Human
cggccuauagcuccuaaccaccc

SEQ ID NO: 1375714 - RNA, 19 nt, Human
cggggaggaacccucgaug

SEQ ID NO: 1375715 - RNA, 18 nt, Human
cucaggggguggccaccg

SEQ ID NO: 1375716 - RNA, 19 nt, Human
cucaucgccuacgucuuua

SEQ ID NO: 1375717 - RNA, 23 nt, Human
cuccaggugagggagggacagga

SEQ ID NO: 1375718 - RNA, 21 nt, Human
cuccccugccaacuucacccc

SEQ ID NO: 1375719 - RNA, 23 nt, Human
cuccugcaccccacccacucacu

SEQ ID NO: 1375720 - RNA, 22 nt, Human
cucggcagaaucuucuaugcca

SEQ ID NO: 1375721 - RNA, 22 nt, Human
cugcaugacccccucugcucuc

SEQ ID NO: 1375722 - RNA, 23 nt, Human
cugccaacuucaccccaguaccc

SEQ ID NO: 1375723 - RNA, 21 nt, Human
cuucacaaggcagacagaggg

SEQ ID NO: 1375724 - RNA, 20 nt, Human
cuucccagccccacccacca

SEQ ID NO: 1375725 - RNA, 22 nt, Human
gaaagaacaggacaacccggag

SEQ ID NO: 1375726 - RNA, 21 nt, Human
gacaggguuggggggagauga

SEQ ID NO: 1375727 - RNA, 24 nt, Human
gaccuggccccugccaccuucaca

SEQ ID NO: 1375728 - RNA, 24 nt, Human
gagggacaggaugugguccuaugu

SEQ ID NO: 1375729 - RNA, 22 nt, Human
gagggguggggugggacagggu

SEQ ID NO: 1375730 - RNA, 20 nt, Human
gcacacgcucaccuccagau

SEQ ID NO: 1375731 - RNA, 18 nt, Human
gccaccgugcucugagca

SEQ ID NO: 1375732 - RNA, 21 nt, Human
gccaggaggugggccuggggu

SEQ ID NO: 1375733 - RNA, 20 nt, Human
gccccacccaccaccccaac

SEQ ID NO: 1375734 - RNA, 21 nt, Human
gcccugccugaacucugcugu

SEQ ID NO: 1375735 - RNA, 24 nt, Human
gccuuuggggagaugaggcgcugg

SEQ ID NO: 1375736 - RNA, 19 nt, Human
ggaaagagcugccucggca

SEQ ID NO: 1375737 - RNA, 23 nt, Human
ggagaggccagucccaccucggg

SEQ ID NO: 1375738 - RNA, 23 nt, Human
ggagaugagcaagcccagaaaga

SEQ ID NO: 1375739 - RNA, 22 nt, Human
ggagaugaggcgcuggggcugc

SEQ ID NO: 1375740 - RNA, 23 nt, Human
ggagaugaggcgcuggggcugcu

SEQ ID NO: 1375741 - RNA, 19 nt, Human
ggaggaacuucagcagugg

SEQ ID NO: 1375742 - RNA, 20 nt, Human
ggaggaacuucagcagugga

SEQ ID NO: 1375743 - RNA, 20 nt, Human
ggaggggaggagguggaggg

SEQ ID NO: 1375744 - RNA, 21 nt, Human
ggccaggaggugggccugggg

SEQ ID NO: 1375745 - RNA, 19 nt, Human
ggcccuggaagacucggca

SEQ ID NO: 1375746 - RNA, 22 nt, Human
gggaggagguggagggaagagg

SEQ ID NO: 1375747 - RNA, 22 nt, Human
gggcacaggccccuacaccagc

SEQ ID NO: 1375748 - RNA, 21 nt, Human
ggggaggaacccucgauggca

SEQ ID NO: 1375749 - RNA, 23 nt, Human
ggggaggagguggagggaagagg

SEQ ID NO: 1375750 - RNA, 18 nt, Human
gggugcccucccucacag

SEQ ID NO: 1375751 - RNA, 20 nt, Human
ggguggccaccgugcucuga

SEQ ID NO: 1375752 - RNA, 21 nt, Human
gguagacagacacauaaccgc

SEQ ID NO: 1375753 - RNA, 21 nt, Human
gguggcuccuccccgcccccc

SEQ ID NO: 1375754 - RNA, 20 nt, Human
guagacagacacauaaccgc

SEQ ID NO: 1375755 - RNA, 19 nt, Human
gugcaugugugcaccacac

SEQ ID NO: 1375756 - RNA, 30 nt, Human
uaaaagcucaaaccaguuucuucccagccc

SEQ ID NO: 1375757 - RNA, 21 nt, Human
uaacauggucuugauuuuucu

SEQ ID NO: 1375758 - RNA, 25 nt, Human
uacacacacacacacacacacacac

SEQ ID NO: 1375759 - RNA, 22 nt, Human
uacacacgagccggacgcacac

SEQ ID NO: 1375760 - RNA, 22 nt, Human
uacaccagcaccaagugaccag

SEQ ID NO: 1375761 - RNA, 19 nt, Human
uacacggaaacaccugggg

SEQ ID NO: 1375762 - RNA, 25 nt, Human
uacccagggcuaaggcugagaaggc

SEQ ID NO: 1375763 - RNA, 24 nt, Human
uagacagacacauaaccgccugca

SEQ ID NO: 1375764 - RNA, 22 nt, Human
uaggccugggagcaggaaccag

SEQ ID NO: 1375765 - RNA, 21 nt, Human
ucaagcucuccccugccaacu

SEQ ID NO: 1375766 - RNA, 19 nt, Human
ucacaaggcagacagaggg

SEQ ID NO: 1375767 - RNA, 18 nt, Human
ucagcaguggagguaugg

SEQ ID NO: 1375768 - RNA, 24 nt, Human
ucagcaguggagguaugggagggg

SEQ ID NO: 1375769 - RNA, 20 nt, Human
ucagggaggcgaagugucaa

SEQ ID NO: 1375770 - RNA, 23 nt, Human
uccacacacacacuccccagggg

SEQ ID NO: 1375771 - RNA, 25 nt, Human
uccacggcugguuucugauucagcc

SEQ ID NO: 1375772 - RNA, 24 nt, Human
uccaguuucaccauuuaaaauaau

SEQ ID NO: 1375773 - RNA, 20 nt, Human
uccauugccccagaccucag

SEQ ID NO: 1375774 - RNA, 21 nt, Human
ucccagagcacccugcuugcc

SEQ ID NO: 1375775 - RNA, 21 nt, Human
ucccagccccacccaccaccc

SEQ ID NO: 1375776 - RNA, 22 nt, Human
ucccagccccacccaccacccc

SEQ ID NO: 1375777 - RNA, 22 nt, Human
ucccauccgcccucccgcuuca

SEQ ID NO: 1375778 - RNA, 19 nt, Human
uccccaggggccaagucuu

SEQ ID NO: 1375779 - RNA, 22 nt, Human
uccuccccgccccccaggaccc

SEQ ID NO: 1375780 - RNA, 23 nt, Human
uccugcaccccacccacucacug

SEQ ID NO: 1375781 - RNA, 22 nt, Human
ucuaugccagaaaugagugugg

SEQ ID NO: 1375782 - RNA, 26 nt, Human
ucucugucuccugcaccccacccacu

SEQ ID NO: 1375783 - RNA, 21 nt, Human
ucugagcagcaggcauaggcu

SEQ ID NO: 1375784 - RNA, 21 nt, Human
ucugcugugcugcuccaggug

SEQ ID NO: 1375785 - RNA, 24 nt, Human
ucuucccagccccacccaccaccc

SEQ ID NO: 1375786 - RNA, 19 nt, Human
ugaccagggccuggcugug

SEQ ID NO: 1375787 - RNA, 23 nt, Human
ugaccagggccuggcugugcccu

SEQ ID NO: 1375788 - RNA, 21 nt, Human
ugaggcaccccuggcagaccc

SEQ ID NO: 1375789 - RNA, 22 nt, Human
ugaggcaccccuggcagacccc

SEQ ID NO: 1375790 - RNA, 24 nt, Human
ugaggcaccccuggcagaccccga

SEQ ID NO: 1375791 - RNA, 28 nt, Human
ugcacacagacacacacucaaguacacg

SEQ ID NO: 1375792 - RNA, 25 nt, Human
ugcauacacacacacacacacacac

SEQ ID NO: 1375793 - RNA, 19 nt, Human
ugcaugugugcaccacaca

SEQ ID NO: 1375794 - RNA, 22 nt, Human
ugccagugcccaaccugauggg

SEQ ID NO: 1375795 - RNA, 25 nt, Human
ugccccagaccucagggcugagucu

SEQ ID NO: 1375796 - RNA, 18 nt, Human
ugccugaacucugcugug

SEQ ID NO: 1375797 - RNA, 22 nt, Human
ugcuugcccagggacuguggug

SEQ ID NO: 1375798 - RNA, 18 nt, Human
uggcaggaggggguggcg

SEQ ID NO: 1375799 - RNA, 19 nt, Human
uggcaggaggggguggcga

SEQ ID NO: 1375800 - RNA, 18 nt, Human
ugggacaggguugggggg

SEQ ID NO: 1375801 - RNA, 19 nt, Human
ugggaggggugggguggga

SEQ ID NO: 1375802 - RNA, 23 nt, Human
ugggcccaguggggacggggcug

SEQ ID NO: 1375803 - RNA, 23 nt, Human
uggggguagacagacacauaacc

SEQ ID NO: 1375804 - RNA, 19 nt, Human
uggggugggacaggguugg

SEQ ID NO: 1375805 - RNA, 20 nt, Human
uggguggggaccacgcagca

SEQ ID NO: 1375806 - RNA, 18 nt, Human
ugggugggugcccucccu

SEQ ID NO: 1375807 - RNA, 23 nt, Human
ugguggaggagcggcccuggaag

SEQ ID NO: 1375808 - RNA, 22 nt, Human
uguaugcaugcaggcucacaca

SEQ ID NO: 1375809 - RNA, 20 nt, Human
ugucaggcagaccuggcccc

SEQ ID NO: 1375810 - RNA, 18 nt, Human
ugugcaccacacauguau

SEQ ID NO: 1375811 - RNA, 22 nt, Human
ugugcaccacacauguaugcau

SEQ ID NO: 1375812 - RNA, 19 nt, Human
uucacaugggcacacacac

SEQ ID NO: 1375813 - RNA, 23 nt, Human
uucccagccccacccaccacccc

SEQ ID NO: 1375814 - RNA, 23 nt, Human
uuccucgcuccuggcucauccca

SEQ ID NO: 1375815 - RNA, 28 nt, Human
uuuuucuaucacaaacagagccuagcug

SEQ ID NO: 1375816 - RNA, 23 nt, Human
aaaaauaaucauaauaaucacac

SEQ ID NO: 1375817 - RNA, 22 nt, Human
aaggacaaugaggagggggugc

SEQ ID NO: 1375818 - RNA, 26 nt, Human
aaugcggccuccugugccgcccuggg

SEQ ID NO: 1375819 - RNA, 21 nt, Human
acccuacuccaccugcucagc

SEQ ID NO: 1375820 - RNA, 18 nt, Human
accugcgaugcugcugga

SEQ ID NO: 1375821 - RNA, 18 nt, Human
acucggccccgccugcgg

SEQ ID NO: 1375822 - RNA, 18 nt, Human
acugcccgaugccugcug

SEQ ID NO: 1375823 - RNA, 18 nt, Human
agcaccaggccuaccugc

SEQ ID NO: 1375824 - RNA, 23 nt, Human
auuugggcuuguauugggagcuu

SEQ ID NO: 1375825 - RNA, 23 nt, Human
caagcacugccuggagccaggga

SEQ ID NO: 1375826 - RNA, 19 nt, Human
caccagcaccaggccuacc

SEQ ID NO: 1375827 - RNA, 19 nt, Human
caccuggagcacaccugca

SEQ ID NO: 1375828 - RNA, 24 nt, Human
cacuucaccagcaccaggccuacc

SEQ ID NO: 1375829 - RNA, 26 nt, Human
ccaccuggagcacaccugcaguucgc

SEQ ID NO: 1375830 - RNA, 22 nt, Human
ccccgccugcggacccucugcc

SEQ ID NO: 1375831 - RNA, 22 nt, Human
cccgccugcggacccucugccc

SEQ ID NO: 1375832 - RNA, 21 nt, Human
ccgaugccugcugcgcccugc

SEQ ID NO: 1375833 - RNA, 21 nt, Human
ccuagacaaggacaaugagga

SEQ ID NO: 1375834 - RNA, 24 nt, Human
ccugaaguuagcugacaaugggcu

SEQ ID NO: 1375835 - RNA, 18 nt, Human
ccugcggacccucugccc

SEQ ID NO: 1375836 - RNA, 20 nt, Human
ccuggagcacaccugcaguu

SEQ ID NO: 1375837 - RNA, 21 nt, Human
ccuggcaucuuccccaaucuu

SEQ ID NO: 1375838 - RNA, 19 nt, Human
cggccccgccugcggaccc

SEQ ID NO: 1375839 - RNA, 19 nt, Human
cucacccuacuccaccugc

SEQ ID NO: 1375840 - RNA, 22 nt, Human
cucacccuacuccaccugcuca

SEQ ID NO: 1375841 - RNA, 23 nt, Human
cuccugcacccuggagucacgcc

SEQ ID NO: 1375842 - RNA, 18 nt, Human
cugcccuuugucuugccc

SEQ ID NO: 1375843 - RNA, 19 nt, Human
cuggcaucuuccccaaucu

SEQ ID NO: 1375844 - RNA, 22 nt, Human
cuucaccagcaccaggccuacc

SEQ ID NO: 1375845 - RNA, 18 nt, Human
gccucugggacugggucc

SEQ ID NO: 1375846 - RNA, 21 nt, Human
ggagcucacccuacuccaccu

SEQ ID NO: 1375847 - RNA, 23 nt, Human
ggcaggagccuuugcaggggugc

SEQ ID NO: 1375848 - RNA, 21 nt, Human
ggcuggccucugggacugggu

SEQ ID NO: 1375849 - RNA, 23 nt, Human
gggugcacguggaguccccgcgg

SEQ ID NO: 1375850 - RNA, 19 nt, Human
ucagcccaggcuccugcac

SEQ ID NO: 1375851 - RNA, 18 nt, Human
uccagauuggaugcuguc

SEQ ID NO: 1375852 - RNA, 20 nt, Human
uccauuggcagaagugaggc

SEQ ID NO: 1375853 - RNA, 21 nt, Human
uccccuggcgcugcgaacccc

SEQ ID NO: 1375854 - RNA, 21 nt, Human
uccucuggaagcccuggucac

SEQ ID NO: 1375855 - RNA, 18 nt, Human
ucucugaaggagguguug

SEQ ID NO: 1375856 - RNA, 23 nt, Human
ucugggacugggucguaggccuu

SEQ ID NO: 1375857 - RNA, 19 nt, Human
ugaaauaagccuuugcucc

SEQ ID NO: 1375858 - RNA, 18 nt, Human
ugaggagggggugcacgu

SEQ ID NO: 1375859 - RNA, 20 nt, Human
ugaggagggggugcacgugg

SEQ ID NO: 1375860 - RNA, 25 nt, Human
ugaggcuuucaaaacuaguaguuuu

SEQ ID NO: 1375861 - RNA, 25 nt, Human
ugcacucggccccgccugcggaccc

SEQ ID NO: 1375862 - RNA, 20 nt, Human
ugcacugccugcacucggga

SEQ ID NO: 1375863 - RNA, 21 nt, Human
ugcccuuugucuugcccaugg

SEQ ID NO: 1375864 - RNA, 21 nt, Human
ugcguuggcgacaugcuggaa

SEQ ID NO: 1375865 - RNA, 25 nt, Human
ugcucagcccaggcuccugcacccu

SEQ ID NO: 1375866 - RNA, 24 nt, Human
ugcugcagugaggggagcaagcac

SEQ ID NO: 1375867 - RNA, 19 nt, Human
ugcuggagaugcgggaugc

SEQ ID NO: 1375868 - RNA, 19 nt, Human
ugcuggguccccuggcgcu

SEQ ID NO: 1375869 - RNA, 25 nt, Human
uggaaaguggauugcguuggcgaca

SEQ ID NO: 1375870 - RNA, 24 nt, Human
uggaaugugcuuccauuggcagaa

SEQ ID NO: 1375871 - RNA, 19 nt, Human
uggagccagggagcuucuc

SEQ ID NO: 1375872 - RNA, 18 nt, Human
uggcaucuuccccaaucu

SEQ ID NO: 1375873 - RNA, 20 nt, Human
uggcggagcucacccuacuc

SEQ ID NO: 1375874 - RNA, 18 nt, Human
ugggagcuugggggaggg

SEQ ID NO: 1375875 - RNA, 23 nt, Human
ugggcuggccucugggacugggu

SEQ ID NO: 1375876 - RNA, 18 nt, Human
ugucaaaaaaaagaugcc

SEQ ID NO: 1375877 - RNA, 21 nt, Human
uuaaaugcggccuccugugcc

SEQ ID NO: 1375878 - RNA, 21 nt, Human
uuauaagaugucaaaaaaaag

SEQ ID NO: 1375879 - RNA, 18 nt, Human
uugugcacuggccgccac

SEQ ID NO: 1375880 - RNA, 22 nt, Human
aaggacaaugaggagggggugc

SEQ ID NO: 1375881 - RNA, 26 nt, Human
aaugcggccuccugugccgcccuggg

SEQ ID NO: 1375882 - RNA, 21 nt, Human
acccuacuccaccugcucagc

SEQ ID NO: 1375883 - RNA, 22 nt, Human
accuggcaucuuccccaaucuu

SEQ ID NO: 1375884 - RNA, 18 nt, Human
acucggccccgccugcgg

SEQ ID NO: 1375885 - RNA, 18 nt, Human
acugcccgaugccugcug

SEQ ID NO: 1375886 - RNA, 20 nt, Human
agucguuuucauuuuucucu

SEQ ID NO: 1375887 - RNA, 23 nt, Human
caagcacugccuggagccaggga

SEQ ID NO: 1375888 - RNA, 19 nt, Human
caccuggagcacaccugca

SEQ ID NO: 1375889 - RNA, 24 nt, Human
cacuucaccagcgccaggccuacc

SEQ ID NO: 1375890 - RNA, 23 nt, Human
caggccuacccgcgaugcuggcu

SEQ ID NO: 1375891 - RNA, 23 nt, Human
cauuuuucucuagcaacugggaa

SEQ ID NO: 1375892 - RNA, 26 nt, Human
ccaccuggagcacaccugcaguucgc

SEQ ID NO: 1375893 - RNA, 22 nt, Human
ccccgccugcggacccucugcc

SEQ ID NO: 1375894 - RNA, 20 nt, Human
ccccggagccaugccauggg

SEQ ID NO: 1375895 - RNA, 22 nt, Human
cccgccugcggacccucugccc

SEQ ID NO: 1375896 - RNA, 21 nt, Human
ccgaugccugcugcgcccugc

SEQ ID NO: 1375897 - RNA, 21 nt, Human
ccuagacaaggacaaugagga

SEQ ID NO: 1375898 - RNA, 24 nt, Human
ccugaaguuagcugacaaugggcu

SEQ ID NO: 1375899 - RNA, 18 nt, Human
ccugcggacccucugccc

SEQ ID NO: 1375900 - RNA, 18 nt, Human
ccuggagcacaccugcag

SEQ ID NO: 1375901 - RNA, 19 nt, Human
cggccccgccugcggaccc

SEQ ID NO: 1375902 - RNA, 19 nt, Human
cucacccuacuccaccugc

SEQ ID NO: 1375903 - RNA, 22 nt, Human
cucacccuacuccaccugcuca

SEQ ID NO: 1375904 - RNA, 18 nt, Human
cugcccuuugucuugccc

SEQ ID NO: 1375905 - RNA, 19 nt, Human
cuggcaucuuccccaaucu

SEQ ID NO: 1375906 - RNA, 22 nt, Human
cuucaccagcgccaggccuacc

SEQ ID NO: 1375907 - RNA, 23 nt, Human
gaaaguggauugcguuggcgaca

SEQ ID NO: 1375908 - RNA, 18 nt, Human
gcccggggccucagcugg

SEQ ID NO: 1375909 - RNA, 18 nt, Human
gccucugggacugggucc

SEQ ID NO: 1375910 - RNA, 21 nt, Human
ggagcucacccuacuccaccu

SEQ ID NO: 1375911 - RNA, 23 nt, Human
ggcaggagccuuugcaggggugc

SEQ ID NO: 1375912 - RNA, 24 nt, Human
ggcgacaugcuugaaugugcuucc

SEQ ID NO: 1375913 - RNA, 21 nt, Human
ggcuggccucugggacugggu

SEQ ID NO: 1375914 - RNA, 23 nt, Human
gggugcacguggagucuccgcgg

SEQ ID NO: 1375915 - RNA, 24 nt, Human
uaaaaucuuugagaugauugacac

SEQ ID NO: 1375916 - RNA, 20 nt, Human
uacccgcgaugcuggcugga

SEQ ID NO: 1375917 - RNA, 18 nt, Human
ucacuggguucuuggcgg

SEQ ID NO: 1375918 - RNA, 18 nt, Human
uccagauuggaugcuguc

SEQ ID NO: 1375919 - RNA, 21 nt, Human
uccccuggcgcugcgaacccc

SEQ ID NO: 1375920 - RNA, 21 nt, Human
uccucuggaagcccuggucac

SEQ ID NO: 1375921 - RNA, 18 nt, Human
ucucugaaggagguguug

SEQ ID NO: 1375922 - RNA, 23 nt, Human
ucugggacugggucaugggccuu

SEQ ID NO: 1375923 - RNA, 19 nt, Human
ugaaauaagccuuugcucc

SEQ ID NO: 1375924 - RNA, 18 nt, Human
ugaggagggggugcacgu

SEQ ID NO: 1375925 - RNA, 20 nt, Human
ugaggagggggugcacgugg

SEQ ID NO: 1375926 - RNA, 25 nt, Human
ugcacucggccccgccugcggaccc

SEQ ID NO: 1375927 - RNA, 20 nt, Human
ugcacugccugcacucggga

SEQ ID NO: 1375928 - RNA, 20 nt, Human
ugccauaaaaucuuugagau

SEQ ID NO: 1375929 - RNA, 21 nt, Human
ugcccuuugucuugcccaugg

SEQ ID NO: 1375930 - RNA, 27 nt, Human
ugcucagcccaggcuccugugcccccc

SEQ ID NO: 1375931 - RNA, 24 nt, Human
ugcugcagugaggggagcaagcac

SEQ ID NO: 1375932 - RNA, 19 nt, Human
ugcuggguccccuggcgcu

SEQ ID NO: 1375933 - RNA, 19 nt, Human
uggagccagggagcuucuc

SEQ ID NO: 1375934 - RNA, 18 nt, Human
uggcaucuuccccaaucu

SEQ ID NO: 1375935 - RNA, 20 nt, Human
uggcggagcucacccuacuc

SEQ ID NO: 1375936 - RNA, 18 nt, Human
ugggagcuugggggaggg

SEQ ID NO: 1375937 - RNA, 23 nt, Human
ugggcuggccucugggacugggu

SEQ ID NO: 1375938 - RNA, 18 nt, Human
ugggucaugggccuugug

SEQ ID NO: 1375939 - RNA, 18 nt, Human
ugucaaaaagaagaugcc

SEQ ID NO: 1375940 - RNA, 21 nt, Human
uuaaaugcggccuccugugcc

SEQ ID NO: 1375941 - RNA, 21 nt, Human
uuauaagaugucaaaaagaag

SEQ ID NO: 1375942 - RNA, 21 nt, Human
uugggcuuguauugggagcuu

SEQ ID NO: 1375943 - RNA, 18 nt, Human
uugugcacuggccgccac

SEQ ID NO: 1375944 - RNA, 24 nt, Human
aagaaagccauuuugaaaaaagcc

SEQ ID NO: 1375945 - RNA, 25 nt, Human
aagaugccaaggcuaaauacagaua

SEQ ID NO: 1375946 - RNA, 22 nt, Human
agugaccaaaugcaaacauacc

SEQ ID NO: 1375947 - RNA, 23 nt, Human
auggcuuuauuugcugauugaga

SEQ ID NO: 1375948 - RNA, 23 nt, Human
caagaccagaugauugucacuag

SEQ ID NO: 1375949 - RNA, 22 nt, Human
cacugcauagucccuacccuuc

SEQ ID NO: 1375950 - RNA, 22 nt, Human
cagcccaaagcugaaacgucaa

SEQ ID NO: 1375951 - RNA, 20 nt, Human
cauagucccuacccuucugg

SEQ ID NO: 1375952 - RNA, 18 nt, Human
ccuucuggauuaaaugaa

SEQ ID NO: 1375953 - RNA, 22 nt, Human
gagauagcaaaauagacauggc

SEQ ID NO: 1375954 - RNA, 21 nt, Human
gccauuuugaaaaaagccacu

SEQ ID NO: 1375955 - RNA, 24 nt, Human
guccaugacauacccuuuugacag

SEQ ID NO: 1375956 - RNA, 21 nt, Human
gugaccaaaugcaaacauacc

SEQ ID NO: 1375957 - RNA, 20 nt, Human
uaagacaaauauaaagaugc

SEQ ID NO: 1375958 - RNA, 22 nt, Human
uacccuuuugacagcccaaagc

SEQ ID NO: 1375959 - RNA, 20 nt, Human
uacuaacagugcuuuggucc

SEQ ID NO: 1375960 - RNA, 26 nt, Human
uagacauggcuuuauuugcugauuga

SEQ ID NO: 1375961 - RNA, 21 nt, Human
uaggaagaaagcagaagugau

SEQ ID NO: 1375962 - RNA, 21 nt, Human
ugauugagaagugguccagcc

SEQ ID NO: 1375963 - RNA, 19 nt, Human
ugcauagucccuacccuuc

SEQ ID NO: 1375964 - RNA, 22 nt, Human
ugcauagucccuacccuucugg

SEQ ID NO: 1375965 - RNA, 18 nt, Human
ugccaaggcuaaauacag

SEQ ID NO: 1375966 - RNA, 24 nt, Human
uucaaaauaagacaaauauaaaga

SEQ ID NO: 1375967 - RNA, 24 nt, Human
aaagcagacgauaagaagcaggga

SEQ ID NO: 1375968 - RNA, 19 nt, Human
aacuuuccccgcuggcacc

SEQ ID NO: 1375969 - RNA, 20 nt, Human
aagaagcagggaaacuuucc

SEQ ID NO: 1375970 - RNA, 22 nt, Human
aagcagacgauaagaagcaggg

SEQ ID NO: 1375971 - RNA, 26 nt, Human
aagcagacgauaagaagcagggaaac

SEQ ID NO: 1375972 - RNA, 20 nt, Human
cacaaaguuccugcagccag

SEQ ID NO: 1375973 - RNA, 18 nt, Human
cccgccuuucccgagggc

SEQ ID NO: 1375974 - RNA, 24 nt, Human
ccgcuggcaccuagcuugcagacc

SEQ ID NO: 1375975 - RNA, 22 nt, Human
ccuccccaccccgccuuucccg

SEQ ID NO: 1375976 - RNA, 19 nt, Human
ccucuuuauuuuuucugcc

SEQ ID NO: 1375977 - RNA, 20 nt, Human
cuggcaccuagcuugcagac

SEQ ID NO: 1375978 - RNA, 23 nt, Human
gaacauggacagcuuuuccaugc

SEQ ID NO: 1375979 - RNA, 19 nt, Human
gacgauaagaagcagggaa

SEQ ID NO: 1375980 - RNA, 23 nt, Human
gauaagaagcagggaaacuuucc

SEQ ID NO: 1375981 - RNA, 22 nt, Human
gcccugggcucaaggucacucg

SEQ ID NO: 1375982 - RNA, 22 nt, Human
gucgaggaggcuaagcugcucu

SEQ ID NO: 1375983 - RNA, 26 nt, Human
guuaaagcagacgauaagaagcaggg

SEQ ID NO: 1375984 - RNA, 27 nt, Human
guuaaagcagacgauaagaagcaggga

SEQ ID NO: 1375985 - RNA, 20 nt, Human
uaaagcagacgauaagaagc

SEQ ID NO: 1375986 - RNA, 23 nt, Human
uaaagcagacgauaagaagcagg

SEQ ID NO: 1375987 - RNA, 20 nt, Human
uaagcugcucucgccucccc

SEQ ID NO: 1375988 - RNA, 21 nt, Human
uaagcugcucucgccucccca

SEQ ID NO: 1375989 - RNA, 21 nt, Human
uaggagucauuaaguauaugg

SEQ ID NO: 1375990 - RNA, 20 nt, Human
ucaaggucacucggugaagc

SEQ ID NO: 1375991 - RNA, 20 nt, Human
uccgucaccaggaagggagg

SEQ ID NO: 1375992 - RNA, 19 nt, Human
ugcuauuacacugagacuu

SEQ ID NO: 1375993 - RNA, 20 nt, Human
uuccccgcuggcaccuagcu

SEQ ID NO: 1375994 - RNA, 20 nt, Human
uugguccugcuauuacacug

SEQ ID NO: 1375995 - RNA, 18 nt, Human
agaauguuagaaucuauu

SEQ ID NO: 1375996 - RNA, 23 nt, Human
aggaaaaacgacgacgaacaaaa

SEQ ID NO: 1375997 - RNA, 18 nt, Human
gaaggaaaaacgacgacg

SEQ ID NO: 1375998 - RNA, 21 nt, Human
ggaaaaacgacgacgaacaaa

SEQ ID NO: 1375999 - RNA, 20 nt, Human
guagcucaaacaucucaagu

SEQ ID NO: 1376000 - RNA, 20 nt, Human
uaggucugauaaaacugguu

SEQ ID NO: 1376001 - RNA, 19 nt, Human
uaugaaggaaaaacgacga

SEQ ID NO: 1376002 - RNA, 21 nt, Human
ucuauccaugaaaacagaauc

SEQ ID NO: 1376003 - RNA, 21 nt, Human
ugaaaacagaaucaauuaaac

SEQ ID NO: 1376004 - RNA, 23 nt, Human
ugaaaacagaaucaauuaaacau

SEQ ID NO: 1376005 - RNA, 22 nt, Human
ugcuuggaagacuuaguugaau

SEQ ID NO: 1376006 - RNA, 20 nt, Human
uuccagugcugcauaacuag

SEQ ID NO: 1376007 - RNA, 23 nt, Human
aaaaacaugaaucuccuucaaga

SEQ ID NO: 1376008 - RNA, 21 nt, Human
aaacaagccaaucacaucgaa

SEQ ID NO: 1376009 - RNA, 22 nt, Human
aaacaagccaaucacaucgaau

SEQ ID NO: 1376010 - RNA, 24 nt, Human
aaacuucugacauguaaacauacu

SEQ ID NO: 1376011 - RNA, 20 nt, Human
aacaaaacuucugacaugua

SEQ ID NO: 1376012 - RNA, 27 nt, Human
aacucuguacauguucacaaauuauug

SEQ ID NO: 1376013 - RNA, 24 nt, Human
aagcuggaaaaaaguaauugcuag

SEQ ID NO: 1376014 - RNA, 22 nt, Human
aauugcuagggaagggaaaaau

SEQ ID NO: 1376015 - RNA, 20 nt, Human
acgccggggcgcggagacgg

SEQ ID NO: 1376016 - RNA, 19 nt, Human
acucuguacauguucacaa

SEQ ID NO: 1376017 - RNA, 18 nt, Human
agacccgggaggcgggag

SEQ ID NO: 1376018 - RNA, 25 nt, Human
aggcaguaaaaaaauguauuccuga

SEQ ID NO: 1376019 - RNA, 20 nt, Human
agguuccccgcugucagccu

SEQ ID NO: 1376020 - RNA, 24 nt, Human
agguuccccgcugucagccucacu

SEQ ID NO: 1376021 - RNA, 24 nt, Human
aguggaauagucgagggaagcgag

SEQ ID NO: 1376022 - RNA, 22 nt, Human
aguguacauggcugagcaugca

SEQ ID NO: 1376023 - RNA, 23 nt, Human
auaaaacaaauacauauaguuca

SEQ ID NO: 1376024 - RNA, 20 nt, Human
auaguuacaaagauaccugc

SEQ ID NO: 1376025 - RNA, 22 nt, Human
augagauagggcacaaucuguu

SEQ ID NO: 1376026 - RNA, 23 nt, Human
auuacaauagaauuacacagugc

SEQ ID NO: 1376027 - RNA, 22 nt, Human
caaaaauaacuucauaagccau

SEQ ID NO: 1376028 - RNA, 23 nt, Human
caaaacuucugacauguaaacau

SEQ ID NO: 1376029 - RNA, 23 nt, Human
caacgcaauacuguugaaccaca

SEQ ID NO: 1376030 - RNA, 20 nt, Human
cagcauaaucuucaagacaa

SEQ ID NO: 1376031 - RNA, 26 nt, Human
caguuuuguuuuaaaaauugguuuaa

SEQ ID NO: 1376032 - RNA, 19 nt, Human
cauacugccauguuccuga

SEQ ID NO: 1376033 - RNA, 24 nt, Human
cauagaauuaaacaaaacuucuga

SEQ ID NO: 1376034 - RNA, 21 nt, Human
ccaccgcggggagggcggagg

SEQ ID NO: 1376035 - RNA, 22 nt, Human
ccagucuucagcaaaacuaaaa

SEQ ID NO: 1376036 - RNA, 20 nt, Human
ccccgcugucagccucacuc

SEQ ID NO: 1376037 - RNA, 18 nt, Human
ccgcuguccucccucggc

SEQ ID NO: 1376038 - RNA, 20 nt, Human
ccucacuccgccgccgccag

SEQ ID NO: 1376039 - RNA, 21 nt, Human
cgccacauaaaaacaagccaa

SEQ ID NO: 1376040 - RNA, 25 nt, Human
cgccaggccccgcuguccucccucg

SEQ ID NO: 1376041 - RNA, 18 nt, Human
gcauaaacagcauaaucu

SEQ ID NO: 1376042 - RNA, 21 nt, Human
gccagucuucagcaaaacuaa

SEQ ID NO: 1376043 - RNA, 21 nt, Human
gcuuuuuuuucuuuaucacaa

SEQ ID NO: 1376044 - RNA, 20 nt, Human
ggccccgcuguccucccucg

SEQ ID NO: 1376045 - RNA, 23 nt, Human
gggagggagugucuccaguggcg

SEQ ID NO: 1376046 - RNA, 19 nt, Human
gucgagggaagcgaggaag

SEQ ID NO: 1376047 - RNA, 18 nt, Human
uaagaagaguugaagcug

SEQ ID NO: 1376048 - RNA, 19 nt, Human
uaaucuguaggcaacccuc

SEQ ID NO: 1376049 - RNA, 18 nt, Human
uaauugcuagggaaggga

SEQ ID NO: 1376050 - RNA, 18 nt, Human
uacacagugccugaaaau

SEQ ID NO: 1376051 - RNA, 20 nt, Human
uacagcuguuaaacagguuc

SEQ ID NO: 1376052 - RNA, 24 nt, Human
uaccauagaauuaaacaaaacuuc

SEQ ID NO: 1376053 - RNA, 21 nt, Human
uaggaaagcuguccauuaaua

SEQ ID NO: 1376054 - RNA, 22 nt, Human
uaucaaaaauaacuucauaagc

SEQ ID NO: 1376055 - RNA, 20 nt, Human
uaucacaauucacuaaguga

SEQ ID NO: 1376056 - RNA, 24 nt, Human
uauucugcugaccucuuaauuuca

SEQ ID NO: 1376057 - RNA, 18 nt, Human
ucaaagcacuuugauuua

SEQ ID NO: 1376058 - RNA, 20 nt, Human
ucaaagcacuuugauuuaag

SEQ ID NO: 1376059 - RNA, 22 nt, Human
ucggcggaacaauggcggcuuu

SEQ ID NO: 1376060 - RNA, 23 nt, Human
ucucggcgccagcgccaggcccc

SEQ ID NO: 1376061 - RNA, 21 nt, Human
ucugugcauaagauccaagga

SEQ ID NO: 1376062 - RNA, 21 nt, Human
ugaaucuccuucaagaaauug

SEQ ID NO: 1376063 - RNA, 19 nt, Human
ugacauguaaacauacugc

SEQ ID NO: 1376064 - RNA, 21 nt, Human
ugacauguaaacauacugcca

SEQ ID NO: 1376065 - RNA, 18 nt, Human
ugagauagggcacaaucu

SEQ ID NO: 1376066 - RNA, 18 nt, Human
ugauaaaaguuaauaauc

SEQ ID NO: 1376067 - RNA, 24 nt, Human
ugcaaacacauguccaauucagga

SEQ ID NO: 1376068 - RNA, 23 nt, Human
ugcuaccaacaaauauguaaaga

SEQ ID NO: 1376069 - RNA, 21 nt, Human
ugcuagggaagggaaaaaugu

SEQ ID NO: 1376070 - RNA, 21 nt, Human
uggauggauagaucaguacca

SEQ ID NO: 1376071 - RNA, 21 nt, Human
ugguaaaggcuauuuacagug

SEQ ID NO: 1376072 - RNA, 19 nt, Human
ugguacaaguucugugcau

SEQ ID NO: 1376073 - RNA, 24 nt, Human
uguaaagauauggcagguuaugca

SEQ ID NO: 1376074 - RNA, 24 nt, Human
uugaucaaagcacuuugauuuaag

SEQ ID NO: 1376075 - RNA, 30 nt, Human
aaaaaaaaaaaacagaacauagaucaaggg

SEQ ID NO: 1376076 - RNA, 29 nt, Human
aaaaaaaaaacagaacauagagggacccc

SEQ ID NO: 1376077 - RNA, 24 nt, Human
aaaaaaaacagaacauagaucaag

SEQ ID NO: 1376078 - RNA, 21 nt, Human
aaaaaaacagaacauagauca

SEQ ID NO: 1376079 - RNA, 22 nt, Human
aaaaaaacagaacauagaucaa

SEQ ID NO: 1376080 - RNA, 23 nt, Human
aaaaaaacagaacauagaucaag

SEQ ID NO: 1376081 - RNA, 19 nt, Human
aaacagaacauagaucaag

SEQ ID NO: 1376082 - RNA, 25 nt, Human
aaacauuuccaccaaccucaaaccc

SEQ ID NO: 1376083 - RNA, 22 nt, Human
aaaccccgucucuccuaaaaaa

SEQ ID NO: 1376084 - RNA, 19 nt, Human
aacacggugaaaccccguc

SEQ ID NO: 1376085 - RNA, 20 nt, Human
aacacggugaaaccccgucu

SEQ ID NO: 1376086 - RNA, 21 nt, Human
aacacggugaaaccccgucuc

SEQ ID NO: 1376087 - RNA, 21 nt, Human
aagcaagauccagugguugug

SEQ ID NO: 1376088 - RNA, 20 nt, Human
accaacaagaauacacauaa

SEQ ID NO: 1376089 - RNA, 24 nt, Human
acccagcccauauacaacuauuuc

SEQ ID NO: 1376090 - RNA, 18 nt, Human
accccgucucuccuaaaa

SEQ ID NO: 1376091 - RNA, 19 nt, Human
acccuggaaacagagugag

SEQ ID NO: 1376092 - RNA, 19 nt, Human
acugcacucuagccugggc

SEQ ID NO: 1376093 - RNA, 24 nt, Human
acugcacucuagccugggcggcag

SEQ ID NO: 1376094 - RNA, 22 nt, Human
agaagaggaaucagagcucagg

SEQ ID NO: 1376095 - RNA, 19 nt, Human
agacagaagaggaaucaga

SEQ ID NO: 1376096 - RNA, 18 nt, Human
agacagagaccauggggg

SEQ ID NO: 1376097 - RNA, 24 nt, Human
agaggucgugccacugcacucuag

SEQ ID NO: 1376098 - RNA, 21 nt, Human
agcaaacuggacaggaagggg

SEQ ID NO: 1376099 - RNA, 24 nt, Human
agcacuuugagaggcugaggcggg

SEQ ID NO: 1376100 - RNA, 22 nt, Human
agcaguauagaaaccacucccc

SEQ ID NO: 1376101 - RNA, 24 nt, Human
agccugggcggcagggcgagacuc

SEQ ID NO: 1376102 - RNA, 20 nt, Human
agcugggcaugguggugggc

SEQ ID NO: 1376103 - RNA, 26 nt, Human
aggaagggguggguggggcugggggg

SEQ ID NO: 1376104 - RNA, 24 nt, Human
aggcaggaaauggcgucaacccag

SEQ ID NO: 1376105 - RNA, 19 nt, Human
aggcaggcaugaaaaucag

SEQ ID NO: 1376106 - RNA, 24 nt, Human
aggcaggcaugaaaaucagccaga

SEQ ID NO: 1376107 - RNA, 21 nt, Human
aggccgaggcaggaaauggcg

SEQ ID NO: 1376108 - RNA, 19 nt, Human
aggcgggaggaucacaagg

SEQ ID NO: 1376109 - RNA, 24 nt, Human
aggcgggaggaucacaaggucagg

SEQ ID NO: 1376110 - RNA, 19 nt, Human
aggcugaggcgggaggauc

SEQ ID NO: 1376111 - RNA, 20 nt, Human
aggcugggugcgguggcuca

SEQ ID NO: 1376112 - RNA, 23 nt, Human
aggggcacagcugacaaucacca

SEQ ID NO: 1376113 - RNA, 21 nt, Human
agggguggguggggcuggggg

SEQ ID NO: 1376114 - RNA, 20 nt, Human
agguugcuucuuugaggcac

SEQ ID NO: 1376115 - RNA, 22 nt, Human
aguacuggguguguagagguug

SEQ ID NO: 1376116 - RNA, 22 nt, Human
caaaaaggagagaggagcccca

SEQ ID NO: 1376117 - RNA, 25 nt, Human
caaacuggacaggaaggggugggug

SEQ ID NO: 1376118 - RNA, 22 nt, Human
caaccucaaaccccauggcccu

SEQ ID NO: 1376119 - RNA, 24 nt, Human
cacaccuguaaucccagcacuuug

SEQ ID NO: 1376120 - RNA, 18 nt, Human
cacauaaucaucacuaau

SEQ ID NO: 1376121 - RNA, 23 nt, Human
caccaaauggaaaccaaaaccca

SEQ ID NO: 1376122 - RNA, 18 nt, Human
caccuguaaucccagcac

SEQ ID NO: 1376123 - RNA, 23 nt, Human
caccuguaaucccagcacuuuga

SEQ ID NO: 1376124 - RNA, 19 nt, Human
caccuguagucccagcuac

SEQ ID NO: 1376125 - RNA, 23 nt, Human
caccuguagucccagcuacucca

SEQ ID NO: 1376126 - RNA, 19 nt, Human
cacugcacucuagccuggg

SEQ ID NO: 1376127 - RNA, 20 nt, Human
cacugcacucuagccugggc

SEQ ID NO: 1376128 - RNA, 21 nt, Human
cacugcacucuagccugggcg

SEQ ID NO: 1376129 - RNA, 24 nt, Human
cacugcacucuagccugggcggca

SEQ ID NO: 1376130 - RNA, 24 nt, Human
cagaaacacucauuccacaccaaa

SEQ ID NO: 1376131 - RNA, 26 nt, Human
cagaacauagaucaagguucauguaa

SEQ ID NO: 1376132 - RNA, 24 nt, Human
cagcacuuugagaggcugaggcgg

SEQ ID NO: 1376133 - RNA, 24 nt, Human
cagcuacuccagaggccgaggcag

SEQ ID NO: 1376134 - RNA, 23 nt, Human
caggaagggguggguggggcugg

SEQ ID NO: 1376135 - RNA, 22 nt, Human
cauauacaacuauuucagaaca

SEQ ID NO: 1376136 - RNA, 24 nt, Human
ccacaccaaauggaaaccaaaacc

SEQ ID NO: 1376137 - RNA, 20 nt, Human
ccacugcacucuagccuggg

SEQ ID NO: 1376138 - RNA, 20 nt, Human
ccacugcacucuagccuggg

SEQ ID NO: 1376139 - RNA, 21 nt, Human
ccacugcacucuagccugggc

SEQ ID NO: 1376140 - RNA, 21 nt, Human
ccacugcacucuagccugggc

SEQ ID NO: 1376141 - RNA, 22 nt, Human
ccacugcacucuagccugggcg

SEQ ID NO: 1376142 - RNA, 22 nt, Human
ccacugcacucuagccugggcg

SEQ ID NO: 1376143 - RNA, 23 nt, Human
ccacugcacucuagccugggcgg

SEQ ID NO: 1376144 - RNA, 24 nt, Human
ccacugcacucuagccugggcggc

SEQ ID NO: 1376145 - RNA, 21 nt, Human
ccagacagaagaggaaucaga

SEQ ID NO: 1376146 - RNA, 22 nt, Human
cccacaguucagaaacacucau

SEQ ID NO: 1376147 - RNA, 19 nt, Human
ccucaaaccccauggcccu

SEQ ID NO: 1376148 - RNA, 28 nt, Human
ccucacuguggggcaugggggcgaggac

SEQ ID NO: 1376149 - RNA, 19 nt, Human
ccucuacccuggaaacaga

SEQ ID NO: 1376150 - RNA, 23 nt, Human
ccugacuaacacggugaaacccc

SEQ ID NO: 1376151 - RNA, 24 nt, Human
ccugacuaacacggugaaaccccg

SEQ ID NO: 1376152 - RNA, 22 nt, Human
ccugggcggcagggcgagacuc

SEQ ID NO: 1376153 - RNA, 22 nt, Human
ccuguagucccagcuacuccag

SEQ ID NO: 1376154 - RNA, 23 nt, Human
ccuguagucccagcuacuccaga

SEQ ID NO: 1376155 - RNA, 24 nt, Human
cgagaccauccugacuaacacggu

SEQ ID NO: 1376156 - RNA, 24 nt, Human
cgaggcaggaaauggcgucaaccc

SEQ ID NO: 1376157 - RNA, 22 nt, Human
cucacaccuguaaucccagcac

SEQ ID NO: 1376158 - RNA, 24 nt, Human
cucacaccuguaaucccagcacuu

SEQ ID NO: 1376159 - RNA, 19 nt, Human
cucaggauauagauugaga

SEQ ID NO: 1376160 - RNA, 22 nt, Human
cucagucaaaaaaaaaaaaaaa

SEQ ID NO: 1376161 - RNA, 22 nt, Human
cucauuccacaccaaauggaaa

SEQ ID NO: 1376162 - RNA, 23 nt, Human
cucauuccacaccaaauggaaac

SEQ ID NO: 1376163 - RNA, 22 nt, Human
cucugacuuuugggcagccccc

SEQ ID NO: 1376164 - RNA, 18 nt, Human
cugacuaacacggugaaa

SEQ ID NO: 1376165 - RNA, 19 nt, Human
cugcaugcuuaucucaccc

SEQ ID NO: 1376166 - RNA, 22 nt, Human
cuggaccccugagcacuuggga

SEQ ID NO: 1376167 - RNA, 21 nt, Human
gaaacacucauuccacaccaa

SEQ ID NO: 1376168 - RNA, 21 nt, Human
gaaaccaaaacccaguacugg

SEQ ID NO: 1376169 - RNA, 22 nt, Human
gacaggaagggguggguggggc

SEQ ID NO: 1376170 - RNA, 19 nt, Human
gaccccugagcacuuggga

SEQ ID NO: 1376171 - RNA, 21 nt, Human
gcaaggcaggcaugaaaauca

SEQ ID NO: 1376172 - RNA, 24 nt, Human
gccacugcacucuagccugggcgg

SEQ ID NO: 1376173 - RNA, 24 nt, Human
gccucucacccacaguucagaaac

SEQ ID NO: 1376174 - RNA, 20 nt, Human
gcgguggcucacaccuguaa

SEQ ID NO: 1376175 - RNA, 21 nt, Human
ggaagggguggguggggcugg

SEQ ID NO: 1376176 - RNA, 19 nt, Human
ggacaggaaggggugggug

SEQ ID NO: 1376177 - RNA, 20 nt, Human
ggacaggaaggggugggugg

SEQ ID NO: 1376178 - RNA, 18 nt, Human
ggaggaucacaaggucag

SEQ ID NO: 1376179 - RNA, 22 nt, Human
ggcaugguggugggcaccugua

SEQ ID NO: 1376180 - RNA, 21 nt, Human
ggcucacaccuguaaucccag

SEQ ID NO: 1376181 - RNA, 20 nt, Human
gggcaccuguagucccagcu

SEQ ID NO: 1376182 - RNA, 18 nt, Human
gggcuggggggagcugag

SEQ ID NO: 1376183 - RNA, 18 nt, Human
ggguggggcuggggggag

SEQ ID NO: 1376184 - RNA, 19 nt, Human
ggguggggcuggggggagc

SEQ ID NO: 1376185 - RNA, 21 nt, Human
ggguggguggggcugggggga

SEQ ID NO: 1376186 - RNA, 18 nt, Human
ggucaggggcacagcuga

SEQ ID NO: 1376187 - RNA, 23 nt, Human
gguggcucacaccuguaauccca

SEQ ID NO: 1376188 - RNA, 24 nt, Human
gguggcucacaccuguaaucccag

SEQ ID NO: 1376189 - RNA, 24 nt, Human
gguggugggcaccuguagucccag

SEQ ID NO: 1376190 - RNA, 18 nt, Human
gguugugggggcaaggga

SEQ ID NO: 1376191 - RNA, 21 nt, Human
gucaaaaaaaaaaaaaaaaaa

SEQ ID NO: 1376192 - RNA, 24 nt, Human
gucgugccacugcacucuagccug

SEQ ID NO: 1376193 - RNA, 18 nt, Human
gugguuguuccucaaauc

SEQ ID NO: 1376194 - RNA, 18 nt, Human
uaacacggugaaaccccg

SEQ ID NO: 1376195 - RNA, 22 nt, Human
uaacacggugaaaccccgucuc

SEQ ID NO: 1376196 - RNA, 24 nt, Human
uaacacggugaaaccccgucucuc

SEQ ID NO: 1376197 - RNA, 25 nt, Human
uagaaaaaauuagcugggcauggug

SEQ ID NO: 1376198 - RNA, 22 nt, Human
uagagacagagaccauggggga

SEQ ID NO: 1376199 - RNA, 22 nt, Human
uagcucugaguuucacuuuccc

SEQ ID NO: 1376200 - RNA, 23 nt, Human
uaggcugggugcgguggcucaca

SEQ ID NO: 1376201 - RNA, 22 nt, Human
uauaucauuccuccuauccaug

SEQ ID NO: 1376202 - RNA, 21 nt, Human
ucaacccaguaggcagaccuu

SEQ ID NO: 1376203 - RNA, 18 nt, Human
ucacaaggucaggagauc

SEQ ID NO: 1376204 - RNA, 24 nt, Human
ucacaaggucaggagaucgagacc

SEQ ID NO: 1376205 - RNA, 25 nt, Human
ucagucaaaaaaaaaaaaaaaaaaa

SEQ ID NO: 1376206 - RNA, 23 nt, Human
ugaaaccccgucucuccuaaaaa

SEQ ID NO: 1376207 - RNA, 19 nt, Human
ugagaaggacuuaguggca

SEQ ID NO: 1376208 - RNA, 20 nt, Human
ugagaggcugaggcgggagg

SEQ ID NO: 1376209 - RNA, 24 nt, Human
ugagaggcugaggcgggaggauca

SEQ ID NO: 1376210 - RNA, 21 nt, Human
ugaggcgggaggaucacaagg

SEQ ID NO: 1376211 - RNA, 24 nt, Human
ugaggcgggaggaucacaagguca

SEQ ID NO: 1376212 - RNA, 21 nt, Human
uggcgucaacccaguaggcag

SEQ ID NO: 1376213 - RNA, 23 nt, Human
uggcgucaacccaguaggcagac

SEQ ID NO: 1376214 - RNA, 21 nt, Human
uggcucacaccuguaauccca

SEQ ID NO: 1376215 - RNA, 22 nt, Human
uggcucacaccuguaaucccag

SEQ ID NO: 1376216 - RNA, 24 nt, Human
uggcucacaccuguaaucccagca

SEQ ID NO: 1376217 - RNA, 24 nt, Human
ugguggugggcaccuguaguccca

SEQ ID NO: 1376218 - RNA, 19 nt, Human
uguaaaauuuucccugucu

SEQ ID NO: 1376219 - RNA, 18 nt, Human
uguguagagguugcuucu

SEQ ID NO: 1376220 - RNA, 24 nt, Human
uuaaaaccguuucuggggacuuac

SEQ ID NO: 1376221 - RNA, 18 nt, Human
uuagcugggcaugguggu

SEQ ID NO: 1376222 - RNA, 24 nt, Human
uuagcugggcaugguggugggcac

SEQ ID NO: 1376223 - RNA, 25 nt, Human
uugagaggcugaggcgggaggauca

SEQ ID NO: 1376224 - RNA, 21 nt, Human
uugcugacucuguguccagcc

SEQ ID NO: 1376225 - RNA, 20 nt, Human
uugcuucuuugaggcaccug

SEQ ID NO: 1376226 - RNA, 19 nt, Human
uuggaggcacauuccucua

SEQ ID NO: 1376227 - RNA, 24 nt, Human
uuucaaaaaggagagaggagcccc

SEQ ID NO: 1376228 - RNA, 23 nt, Human
uuuucccugucuucaaacagggg

SEQ ID NO: 1376229 - RNA, 18 nt, Human
aaugcagcuucguggccu

SEQ ID NO: 1376230 - RNA, 21 nt, Human
agaauuuuuccaaaaucugac

SEQ ID NO: 1376231 - RNA, 18 nt, Human
aggaaggccacagcagcc

SEQ ID NO: 1376232 - RNA, 21 nt, Human
auacuggaaucuucacagugc

SEQ ID NO: 1376233 - RNA, 24 nt, Human
cacggugguccucagcugggaaug

SEQ ID NO: 1376234 - RNA, 20 nt, Human
ccucagcugggaaugcagcu

SEQ ID NO: 1376235 - RNA, 18 nt, Human
gcacggugguccucagcu

SEQ ID NO: 1376236 - RNA, 21 nt, Human
ucagccacuuucuggaaggca

SEQ ID NO: 1376237 - RNA, 20 nt, Human
uccaaaaucugacggaaaga

SEQ ID NO: 1376238 - RNA, 22 nt, Human
uccucccagauaggguaggagc

SEQ ID NO: 1376239 - RNA, 23 nt, Human
ucuucacagugcaucuguuacuu

SEQ ID NO: 1376240 - RNA, 23 nt, Human
uggaaggcauccaggaaggccac

SEQ ID NO: 1376241 - RNA, 18 nt, Human
ugguguggagggggcggg

SEQ ID NO: 1376242 - RNA, 22 nt, Human
uuaauacuggaaucuucacagu

SEQ ID NO: 1376243 - RNA, 21 nt, Human
uuccaaaaucugacggaaaga

SEQ ID NO: 1376244 - RNA, 18 nt, Human
acuccgcucaggcagggg

SEQ ID NO: 1376245 - RNA, 25 nt, Human
acuccgcucaggcaggggugggggc

SEQ ID NO: 1376246 - RNA, 20 nt, Human
agaaauacuagagaagcugc

SEQ ID NO: 1376247 - RNA, 21 nt, Human
agcccucuuuccugccccucc

SEQ ID NO: 1376248 - RNA, 21 nt, Human
aggcaccccccaucccgagga

SEQ ID NO: 1376249 - RNA, 21 nt, Human
aggcaggggugggggcagggc

SEQ ID NO: 1376250 - RNA, 25 nt, Human
aggcaggggugggggcagggcaggu

SEQ ID NO: 1376251 - RNA, 19 nt, Human
caaguccuugggccgaaua

SEQ ID NO: 1376252 - RNA, 22 nt, Human
cacacaaaaaucaccgaaaaua

SEQ ID NO: 1376253 - RNA, 22 nt, Human
cagcacuggguccacugacgcu

SEQ ID NO: 1376254 - RNA, 20 nt, Human
cagccccgccccccagcccc

SEQ ID NO: 1376255 - RNA, 23 nt, Human
cagccccgccccccagccccaga

SEQ ID NO: 1376256 - RNA, 23 nt, Human
cagccccgccccccagccccaga

SEQ ID NO: 1376257 - RNA, 19 nt, Human
cagccucuccccacccccc

SEQ ID NO: 1376258 - RNA, 22 nt, Human
cagccucuccccaccccccuua

SEQ ID NO: 1376259 - RNA, 18 nt, Human
caggcaggggugggggca

SEQ ID NO: 1376260 - RNA, 18 nt, Human
caggcgccuccggggagg

SEQ ID NO: 1376261 - RNA, 19 nt, Human
cagguuccagccuagaugu

SEQ ID NO: 1376262 - RNA, 19 nt, Human
caguccuccccaucaauca

SEQ ID NO: 1376263 - RNA, 21 nt, Human
cauucacgacggagcugaggg

SEQ ID NO: 1376264 - RNA, 26 nt, Human
ccagccccgccccccagccccagaaa

SEQ ID NO: 1376265 - RNA, 23 nt, Human
ccagggucugcgcaguccucccc

SEQ ID NO: 1376266 - RNA, 21 nt, Human
cccagccucuccccacccccc

SEQ ID NO: 1376267 - RNA, 19 nt, Human
cccccagccccagaaauac

SEQ ID NO: 1376268 - RNA, 20 nt, Human
ccccccagccccagaaauac

SEQ ID NO: 1376269 - RNA, 20 nt, Human
ccccgccccccagccccaga

SEQ ID NO: 1376270 - RNA, 18 nt, Human
ccccuccagccccgcccc

SEQ ID NO: 1376271 - RNA, 25 nt, Human
ccccuccagccccgccccccagccc

SEQ ID NO: 1376272 - RNA, 21 nt, Human
cccgccuggaucccgcccgcc

SEQ ID NO: 1376273 - RNA, 18 nt, Human
ccgccccccagccccaga

SEQ ID NO: 1376274 - RNA, 22 nt, Human
ccgggaugugggggcuuuucuc

SEQ ID NO: 1376275 - RNA, 23 nt, Human
ccuccagccccgccccccagccc

SEQ ID NO: 1376276 - RNA, 18 nt, Human
ccuggaaugcggcucuag

SEQ ID NO: 1376277 - RNA, 20 nt, Human
ccuuauagcccucuuuccug

SEQ ID NO: 1376278 - RNA, 19 nt, Human
cgcugcugcucccaagggg

SEQ ID NO: 1376279 - RNA, 19 nt, Human
cuagagaagcugcaccaua

SEQ ID NO: 1376280 - RNA, 21 nt, Human
cucuccccaccccccuuaucc

SEQ ID NO: 1376281 - RNA, 26 nt, Human
cuuauagcccucuuuccugccccucc

SEQ ID NO: 1376282 - RNA, 21 nt, Human
gaccagagcccuggacauucc

SEQ ID NO: 1376283 - RNA, 23 nt, Human
gacuccgcucaggcagggguggg

SEQ ID NO: 1376284 - RNA, 20 nt, Human
gaggagcggaccagagcccu

SEQ ID NO: 1376285 - RNA, 19 nt, Human
gcccagccucuccccaccc

SEQ ID NO: 1376286 - RNA, 20 nt, Human
gccccagaaauacuagagaa

SEQ ID NO: 1376287 - RNA, 22 nt, Human
gccgucaggguuguucuugacu

SEQ ID NO: 1376288 - RNA, 20 nt, Human
ggacuccgcucaggcagggg

SEQ ID NO: 1376289 - RNA, 21 nt, Human
gggggaggugugcagguucca

SEQ ID NO: 1376290 - RNA, 22 nt, Human
uaccaccagccguuagcgaaac

SEQ ID NO: 1376291 - RNA, 18 nt, Human
uaggcaccccccaucccg

SEQ ID NO: 1376292 - RNA, 22 nt, Human
uaggguugggaagaccccucuu

SEQ ID NO: 1376293 - RNA, 20 nt, Human
ucaggauugagauguggguc

SEQ ID NO: 1376294 - RNA, 20 nt, Human
uccccaccccccuuauccuc

SEQ ID NO: 1376295 - RNA, 23 nt, Human
ucccccggcccagccucucccca

SEQ ID NO: 1376296 - RNA, 21 nt, Human
ucgccagggucugcgcagucc

SEQ ID NO: 1376297 - RNA, 18 nt, Human
ucugcgcaguccucccca

SEQ ID NO: 1376298 - RNA, 23 nt, Human
ugaugcguggacacuccuucccc

SEQ ID NO: 1376299 - RNA, 26 nt, Human
ugggccgaauaagagggagggcagcc

SEQ ID NO: 1376300 - RNA, 19 nt, Human
uuaauauucucacacaaaa

SEQ ID NO: 1376301 - RNA, 22 nt, Human
uuagcgaaacaggauuuuuuuu

SEQ ID NO: 1376302 - RNA, 22 nt, Human
uugaugcguggacacuccuucc

SEQ ID NO: 1376303 - RNA, 20 nt, Human
uugcagcccucccgguacuc

SEQ ID NO: 1376304 - RNA, 25 nt, Human
aaacaggcccuuuaacuggagauuu

SEQ ID NO: 1376305 - RNA, 23 nt, Human
aaagguuacagguuauagcuuua

SEQ ID NO: 1376306 - RNA, 19 nt, Human
aacacacaggcccaaggca

SEQ ID NO: 1376307 - RNA, 22 nt, Human
aaccugcucauuucuuagguuu

SEQ ID NO: 1376308 - RNA, 23 nt, Human
aagacacuggaccgaaagccucc

SEQ ID NO: 1376309 - RNA, 19 nt, Human
aagccugguguccacuccc

SEQ ID NO: 1376310 - RNA, 19 nt, Human
acccgccucugagguuccg

SEQ ID NO: 1376311 - RNA, 22 nt, Human
accucacaggccaguaagaaac

SEQ ID NO: 1376312 - RNA, 18 nt, Human
agaaggugcucagaggcc

SEQ ID NO: 1376313 - RNA, 21 nt, Human
agaaggugcucagaggccagg

SEQ ID NO: 1376314 - RNA, 24 nt, Human
agagcacagcacccuagugaccag

SEQ ID NO: 1376315 - RNA, 27 nt, Human
agauuuuaaagguuacagguuauagcu

SEQ ID NO: 1376316 - RNA, 21 nt, Human
agcuggccaggcuguggggcg

SEQ ID NO: 1376317 - RNA, 18 nt, Human
aggcccaaggcacuacgg

SEQ ID NO: 1376318 - RNA, 22 nt, Human
agggcacugaggggcgaagcca

SEQ ID NO: 1376319 - RNA, 22 nt, Human
agguuucacuggugagagcaac

SEQ ID NO: 1376320 - RNA, 21 nt, Human
aguaagaaacaggcccuuuaa

SEQ ID NO: 1376321 - RNA, 20 nt, Human
agucauugcacagcaaagcc

SEQ ID NO: 1376322 - RNA, 22 nt, Human
cacuggaccgaaagccuccaac

SEQ ID NO: 1376323 - RNA, 22 nt, Human
caggccaguaagaaacaggccc

SEQ ID NO: 1376324 - RNA, 20 nt, Human
cagggcgucccccucaaccc

SEQ ID NO: 1376325 - RNA, 19 nt, Human
caggucaggaggucuggga

SEQ ID NO: 1376326 - RNA, 20 nt, Human
caggucaggaggucugggag

SEQ ID NO: 1376327 - RNA, 23 nt, Human
ccagucauugcacagcaaagcca

SEQ ID NO: 1376328 - RNA, 21 nt, Human
ccccacaucucucagccccac

SEQ ID NO: 1376329 - RNA, 20 nt, Human
cccugcccugaacaugcccc

SEQ ID NO: 1376330 - RNA, 23 nt, Human
ccugcaacuggggucccuggagc

SEQ ID NO: 1376331 - RNA, 22 nt, Human
cgaaagccuccaacacaaaccc

SEQ ID NO: 1376332 - RNA, 23 nt, Human
cgccagagagcacagcacccuag

SEQ ID NO: 1376333 - RNA, 21 nt, Human
cucaacccugcccugaacaug

SEQ ID NO: 1376334 - RNA, 23 nt, Human
cucaacccugcccugaaccgguu

SEQ ID NO: 1376335 - RNA, 23 nt, Human
cuccaacacaaacccuagcugcc

SEQ ID NO: 1376336 - RNA, 24 nt, Human
cucccaccugcuugggcccugcaa

SEQ ID NO: 1376337 - RNA, 20 nt, Human
cucugcugcugggagucucu

SEQ ID NO: 1376338 - RNA, 18 nt, Human
cuguggggcgccagagag

SEQ ID NO: 1376339 - RNA, 18 nt, Human
gagagcagcuuuaacaca

SEQ ID NO: 1376340 - RNA, 27 nt, Human
gcaacuggggucccuggagcuggccag

SEQ ID NO: 1376341 - RNA, 20 nt, Human
gcccaugccgggcggccuuc

SEQ ID NO: 1376342 - RNA, 20 nt, Human
gccuccaacacaaacccuag

SEQ ID NO: 1376343 - RNA, 21 nt, Human
gccuccaacacaaacccuagc

SEQ ID NO: 1376344 - RNA, 18 nt, Human
gccugagcaggaagcucc

SEQ ID NO: 1376345 - RNA, 21 nt, Human
gcuguggaccccuucaggugc

SEQ ID NO: 1376346 - RNA, 18 nt, Human
ggcgucccccucaacccu

SEQ ID NO: 1376347 - RNA, 22 nt, Human
ggcgucccccucaacccugccc

SEQ ID NO: 1376348 - RNA, 19 nt, Human
ggcuguggaccccuucagg

SEQ ID NO: 1376349 - RNA, 21 nt, Human
ggcuguggaccccuucaggug

SEQ ID NO: 1376350 - RNA, 25 nt, Human
gguuucacuggugagagcagcuuua

SEQ ID NO: 1376351 - RNA, 21 nt, Human
uaaagguuacagguuauagcu

SEQ ID NO: 1376352 - RNA, 18 nt, Human
uaacuccuucugagacag

SEQ ID NO: 1376353 - RNA, 18 nt, Human
uaagugugaaauaaaccu

SEQ ID NO: 1376354 - RNA, 20 nt, Human
ucaacccugcccugaacaug

SEQ ID NO: 1376355 - RNA, 21 nt, Human
ucaacccugcccugaacaugc

SEQ ID NO: 1376356 - RNA, 18 nt, Human
ucaggaggucugggaggc

SEQ ID NO: 1376357 - RNA, 25 nt, Human
uccaacacaaacccuagcugccaac

SEQ ID NO: 1376358 - RNA, 18 nt, Human
ucccuggagcuggccagg

SEQ ID NO: 1376359 - RNA, 22 nt, Human
ucccuggagcuggccaggcugu

SEQ ID NO: 1376360 - RNA, 23 nt, Human
ucucucagccccacuaaugcaga

SEQ ID NO: 1376361 - RNA, 23 nt, Human
ucuugagccucaaccacccaggu

SEQ ID NO: 1376362 - RNA, 26 nt, Human
ugagagcagcuuuaacacacaggccc

SEQ ID NO: 1376363 - RNA, 18 nt, Human
ugagccucaaccacccag

SEQ ID NO: 1376364 - RNA, 21 nt, Human
ugaggggcgaagccagugcuu

SEQ ID NO: 1376365 - RNA, 19 nt, Human
ugcaagacacuggaccgaa

SEQ ID NO: 1376366 - RNA, 23 nt, Human
ugccccagggcacugaggggcga

SEQ ID NO: 1376367 - RNA, 22 nt, Human
ugcugcugggagucucuggucu

SEQ ID NO: 1376368 - RNA, 21 nt, Human
ugggcccugcaacuggggucc

SEQ ID NO: 1376369 - RNA, 19 nt, Human
ugugaaauaaaccucucug

SEQ ID NO: 1376370 - RNA, 20 nt, Human
ugugaaauaaaccucucuga

SEQ ID NO: 1376371 - RNA, 19 nt, Human
ugugucugugugugccugu

SEQ ID NO: 1376372 - RNA, 20 nt, Human
uguuguaggacugcaagaca

SEQ ID NO: 1376373 - RNA, 23 nt, Human
uugggcucugcugcugggagucu

SEQ ID NO: 1376374 - RNA, 21 nt, Human
uuucuuagguuucacugguga

SEQ ID NO: 1376375 - RNA, 25 nt, Human
uuucuuagguuucacuggugagagc

SEQ ID NO: 1376376 - RNA, 22 nt, Human
aaaaacuuugaugacaggagca

SEQ ID NO: 1376377 - RNA, 24 nt, Human
aaaaagagagcucaaauccucaac

SEQ ID NO: 1376378 - RNA, 23 nt, Human
aaaacaaaacaaaacaaaaaggu

SEQ ID NO: 1376379 - RNA, 23 nt, Human
aaaacaaaacaaaacaaaacaaa

SEQ ID NO: 1376380 - RNA, 23 nt, Human
aaaacaaaacaaaacaaaacaaa

SEQ ID NO: 1376381 - RNA, 20 nt, Human
aaaacaguuuuaaacacuuu

SEQ ID NO: 1376382 - RNA, 18 nt, Human
aaaagacugaaaauaggc

SEQ ID NO: 1376383 - RNA, 20 nt, Human
aaaaucuccuuugggauuaa

SEQ ID NO: 1376384 - RNA, 19 nt, Human
aaacaaaacaaaacaaaaa

SEQ ID NO: 1376385 - RNA, 22 nt, Human
aaacaaaacaaaacaaaacaaa

SEQ ID NO: 1376386 - RNA, 22 nt, Human
aaacaaaacaaaacaaaacaaa

SEQ ID NO: 1376387 - RNA, 22 nt, Human
aaacaaaacaaaacaaaacaaa

SEQ ID NO: 1376388 - RNA, 22 nt, Human
aaacaaaacaaaacaaaacaaa

SEQ ID NO: 1376389 - RNA, 22 nt, Human
aaacaaaacaaaacaaaacaaa

SEQ ID NO: 1376390 - RNA, 21 nt, Human
aaacagcaccaugguuuuccc

SEQ ID NO: 1376391 - RNA, 28 nt, Human
aaaccagaauagaagcaaccucaaauac

SEQ ID NO: 1376392 - RNA, 21 nt, Human
aaagcacuaagguauaaagca

SEQ ID NO: 1376393 - RNA, 21 nt, Human
aaagcaugugcagcagccuuc

SEQ ID NO: 1376394 - RNA, 23 nt, Human
aacaaaacaaaaagguuaaguuu

SEQ ID NO: 1376395 - RNA, 19 nt, Human
aacaagaaccauaaaaagg

SEQ ID NO: 1376396 - RNA, 22 nt, Human
aacaagaaccauaaaaaggagc

SEQ ID NO: 1376397 - RNA, 18 nt, Human
aagcaaccucaaauacug

SEQ ID NO: 1376398 - RNA, 22 nt, Human
aaggagcagagggaugugggag

SEQ ID NO: 1376399 - RNA, 18 nt, Human
aauagaagcaaccucaaa

SEQ ID NO: 1376400 - RNA, 23 nt, Human
acaaaacaaaacaaaaagguuaa

SEQ ID NO: 1376401 - RNA, 21 nt, Human
acaaaacaaaacaaaacaaaa

SEQ ID NO: 1376402 - RNA, 21 nt, Human
acaaaacaaaacaaaacaaaa

SEQ ID NO: 1376403 - RNA, 21 nt, Human
acaaaacaaaacaaaacaaaa

SEQ ID NO: 1376404 - RNA, 27 nt, Human
acaaaacaaaacaaaacaaaacaaaaa

SEQ ID NO: 1376405 - RNA, 20 nt, Human
acaacaagaaccauaaaaag

SEQ ID NO: 1376406 - RNA, 20 nt, Human
acaagaaccauaaaaaggag

SEQ ID NO: 1376407 - RNA, 22 nt, Human
accauuuaaacauuacauuuaa

SEQ ID NO: 1376408 - RNA, 19 nt, Human
acuucacauccaaacaggu

SEQ ID NO: 1376409 - RNA, 21 nt, Human
agaaaaaaacaguuuuaaaca

SEQ ID NO: 1376410 - RNA, 20 nt, Human
agaauagaagcaaccucaaa

SEQ ID NO: 1376411 - RNA, 24 nt, Human
agaauagauagaucaaugaaggua

SEQ ID NO: 1376412 - RNA, 22 nt, Human
agcuaugaaaaguuccaagcag

SEQ ID NO: 1376413 - RNA, 20 nt, Human
agucucuacucauuuauggc

SEQ ID NO: 1376414 - RNA, 19 nt, Human
auaaaaaggagcagaggga

SEQ ID NO: 1376415 - RNA, 26 nt, Human
auaaaauaggcuuuccuuacaccccc

SEQ ID NO: 1376416 - RNA, 21 nt, Human
auaguuguugaguguucuaaa

SEQ ID NO: 1376417 - RNA, 18 nt, Human
aucaaguacugguccaau

SEQ ID NO: 1376418 - RNA, 18 nt, Human
auccaaacagguguggag

SEQ ID NO: 1376419 - RNA, 21 nt, Human
caaaacaaaacaaaaagguua

SEQ ID NO: 1376420 - RNA, 21 nt, Human
caaaacaaaacaaaacaaaac

SEQ ID NO: 1376421 - RNA, 21 nt, Human
caaaacaaaacaaaacaaaac

SEQ ID NO: 1376422 - RNA, 21 nt, Human
caaaacaaaacaaaacaaaac

SEQ ID NO: 1376423 - RNA, 21 nt, Human
caaaacaaaacaaaacaaaac

SEQ ID NO: 1376424 - RNA, 24 nt, Human
caaaacaaaacaaaacaaaacaaa

SEQ ID NO: 1376425 - RNA, 24 nt, Human
caaaacaaaacaaaacaaaacaaa

SEQ ID NO: 1376426 - RNA, 24 nt, Human
caaaacaaaacaaaacaaaacaaa

SEQ ID NO: 1376427 - RNA, 22 nt, Human
caaagcauauguuccuuuaaaa

SEQ ID NO: 1376428 - RNA, 23 nt, Human
caacacuaaagcacaauuugcca

SEQ ID NO: 1376429 - RNA, 19 nt, Human
cacacacccgcccaugggg

SEQ ID NO: 1376430 - RNA, 20 nt, Human
ccaagcaauacacuggaagc

SEQ ID NO: 1376431 - RNA, 23 nt, Human
ccauuuugguuucuccuuuuuca

SEQ ID NO: 1376432 - RNA, 23 nt, Human
cccaggaaccaugcauuuggggg

SEQ ID NO: 1376433 - RNA, 19 nt, Human
cccgccgccgccgccgcug

SEQ ID NO: 1376434 - RNA, 19 nt, Human
ccgccgccgccgccgcugc

SEQ ID NO: 1376435 - RNA, 22 nt, Human
ccgcugcagccuccuccggcgc

SEQ ID NO: 1376436 - RNA, 18 nt, Human
ccggugcccuccgaguuc

SEQ ID NO: 1376437 - RNA, 19 nt, Human
ccuccgaguucucguugag

SEQ ID NO: 1376438 - RNA, 19 nt, Human
ccucguccgccaccuccgg

SEQ ID NO: 1376439 - RNA, 22 nt, Human
cuaaaagacugaaaauaggcac

SEQ ID NO: 1376440 - RNA, 24 nt, Human
cuaaagcacaauuugccagucucu

SEQ ID NO: 1376441 - RNA, 19 nt, Human
cuaagaauaaaaaaccaga

SEQ ID NO: 1376442 - RNA, 24 nt, Human
cucaagauguggggaugaggaaag

SEQ ID NO: 1376443 - RNA, 19 nt, Human
cucagaaacaugauguuac

SEQ ID NO: 1376444 - RNA, 18 nt, Human
cuccaaauucaaccuaac

SEQ ID NO: 1376445 - RNA, 23 nt, Human
cugaaaauaggcacaguucuccc

SEQ ID NO: 1376446 - RNA, 18 nt, Human
cuggccaacagggcucag

SEQ ID NO: 1376447 - RNA, 22 nt, Human
cuggugcuguaucccaaaauuc

SEQ ID NO: 1376448 - RNA, 23 nt, Human
cuucaaaagcuggugcuguaucc

SEQ ID NO: 1376449 - RNA, 19 nt, Human
cuuuucaacugaguaucug

SEQ ID NO: 1376450 - RNA, 20 nt, Human
gaacagcuauaauugauuuu

SEQ ID NO: 1376451 - RNA, 24 nt, Human
gaaccaacuuuuaaaaggcuccaa

SEQ ID NO: 1376452 - RNA, 23 nt, Human
gaacuaaauccauucauagggaa

SEQ ID NO: 1376453 - RNA, 21 nt, Human
gaacuggaaagcacuaaggua

SEQ ID NO: 1376454 - RNA, 19 nt, Human
gacaaacuuugagaagugc

SEQ ID NO: 1376455 - RNA, 23 nt, Human
gacaacaagaaccauaaaaagga

SEQ ID NO: 1376456 - RNA, 21 nt, Human
gagcagagggaugugggagcu

SEQ ID NO: 1376457 - RNA, 23 nt, Human
gagcucaaauccucaacaaagaa

SEQ ID NO: 1376458 - RNA, 22 nt, Human
gcaacacuaaagcacaauuugc

SEQ ID NO: 1376459 - RNA, 19 nt, Human
gcagcaagaugacagcgac

SEQ ID NO: 1376460 - RNA, 20 nt, Human
gccgcagaguaggaaaugac

SEQ ID NO: 1376461 - RNA, 28 nt, Human
ggacaggcgcgccgcuccggcuucccag

SEQ ID NO: 1376462 - RNA, 18 nt, Human
ggcacaguggucacaugu

SEQ ID NO: 1376463 - RNA, 20 nt, Human
ggcuucguuauacagaccuu

SEQ ID NO: 1376464 - RNA, 19 nt, Human
ggucuucacuugaauuuag

SEQ ID NO: 1376465 - RNA, 21 nt, Human
gugcagcagccuucaaggccg

SEQ ID NO: 1376466 - RNA, 21 nt, Human
guggagggcugacauuuucca

SEQ ID NO: 1376467 - RNA, 25 nt, Human
guuacaauuacagauauauuuaauc

SEQ ID NO: 1376468 - RNA, 18 nt, Human
uaacuugcaaaaggcucu

SEQ ID NO: 1376469 - RNA, 18 nt, Human
uacaauuaaacagcacca

SEQ ID NO: 1376470 - RNA, 20 nt, Human
uacaauuacagauauauuua

SEQ ID NO: 1376471 - RNA, 23 nt, Human
uacccuaauaucuccaccucuaa

SEQ ID NO: 1376472 - RNA, 22 nt, Human
uacugcucuuuucaguuuccau

SEQ ID NO: 1376473 - RNA, 18 nt, Human
uacuuuuccaucucaugg

SEQ ID NO: 1376474 - RNA, 22 nt, Human
uaggaaaugacaacaagaacca

SEQ ID NO: 1376475 - RNA, 23 nt, Human
uaggaaaugacaacaagaaccau

SEQ ID NO: 1376476 - RNA, 21 nt, Human
uaguagugaccuucuaagccu

SEQ ID NO: 1376477 - RNA, 23 nt, Human
uaguuguccaucugucauaggau

SEQ ID NO: 1376478 - RNA, 25 nt, Human
uauacugauuuacccuaauaucucc

SEQ ID NO: 1376479 - RNA, 18 nt, Human
uauuaauugagcuaagaa

SEQ ID NO: 1376480 - RNA, 18 nt, Human
ucaggggcacagugguca

SEQ ID NO: 1376481 - RNA, 22 nt, Human
uccauuaaccaaaacaaaacaa

SEQ ID NO: 1376482 - RNA, 22 nt, Human
ucccaaaauucaucccucuugc

SEQ ID NO: 1376483 - RNA, 23 nt, Human
ucccaaaucucuuuccggccuuc

SEQ ID NO: 1376484 - RNA, 18 nt, Human
ucccucuugcugcguagu

SEQ ID NO: 1376485 - RNA, 19 nt, Human
ucccuggauuuuucagucc

SEQ ID NO: 1376486 - RNA, 20 nt, Human
ucccuggauuuuucaguccc

SEQ ID NO: 1376487 - RNA, 25 nt, Human
ucguccgggcccgccgccgccgccg

SEQ ID NO: 1376488 - RNA, 21 nt, Human
ucuccuuuuucaaaggcuggu

SEQ ID NO: 1376489 - RNA, 20 nt, Human
ucuugcugcguaguugucca

SEQ ID NO: 1376490 - RNA, 22 nt, Human
ugaaaauaggcacaguucuccc

SEQ ID NO: 1376491 - RNA, 23 nt, Human
ugaaauagauuucacgccgcaga

SEQ ID NO: 1376492 - RNA, 20 nt, Human
ugaacaaaaacuuugaugac

SEQ ID NO: 1376493 - RNA, 22 nt, Human
ugagaagugcugcuauucgaug

SEQ ID NO: 1376494 - RNA, 22 nt, Human
ugaggaaagcaacacuaaagca

SEQ ID NO: 1376495 - RNA, 21 nt, Human
ugaugacaucaccaaaucugc

SEQ ID NO: 1376496 - RNA, 21 nt, Human
ugcccgaggagucgugcuggg

SEQ ID NO: 1376497 - RNA, 18 nt, Human
uggaaagcacuaagguau

SEQ ID NO: 1376498 - RNA, 26 nt, Human
uggaaggcaccaaaauuuagugugaa

SEQ ID NO: 1376499 - RNA, 25 nt, Human
uggcacacaaaugaacaaaaacuuu

SEQ ID NO: 1376500 - RNA, 19 nt, Human
uggcucuuuguguuuuauu

SEQ ID NO: 1376501 - RNA, 20 nt, Human
ugggggcccccggcgccucg

SEQ ID NO: 1376502 - RNA, 22 nt, Human
ugguuucuccuuuuucaaaggc

SEQ ID NO: 1376503 - RNA, 22 nt, Human
ugugacaccaguaaaucuuuca

SEQ ID NO: 1376504 - RNA, 20 nt, Human
ugugcagcagccuucaaggc

SEQ ID NO: 1376505 - RNA, 22 nt, Human
uguuacaauuacagauauauuu

SEQ ID NO: 1376506 - RNA, 18 nt, Human
uguuauguuugcaccauc

SEQ ID NO: 1376507 - RNA, 22 nt, Human
uguuauguuugcaccaucaaug

SEQ ID NO: 1376508 - RNA, 22 nt, Human
uuaaaaaaagcacauaaacccu

SEQ ID NO: 1376509 - RNA, 24 nt, Human
uucaauaccauuuaaacauuacau

SEQ ID NO: 1376510 - RNA, 21 nt, Human
uucaucccucuugcugcguag

SEQ ID NO: 1376511 - RNA, 21 nt, Human
uuccaguugacaaacuuugag

SEQ ID NO: 1376512 - RNA, 22 nt, Human
uucuccuuuuucaaaggcuggu

SEQ ID NO: 1376513 - RNA, 21 nt, Human
uugggauuaaugcuguggucu

SEQ ID NO: 1376514 - RNA, 22 nt, Human
uugguuucuccuuuuucaaagg

SEQ ID NO: 1376515 - RNA, 25 nt, Human
uugucuguacuuuuccaucucaugg

SEQ ID NO: 1376516 - RNA, 19 nt, Human
uuuagugugaauguaaaua

SEQ ID NO: 1376517 - RNA, 18 nt, Human
uuucacacuuaaaaauuu

SEQ ID NO: 1376518 - RNA, 19 nt, Human
uuugggauuaaugcugugg

SEQ ID NO: 1376519 - RNA, 23 nt, Human
uuugguuucuccuuuuucaaagg

SEQ ID NO: 1376520 - RNA, 21 nt, Human
uuuuuuuuuuuuaaaaaaagc

SEQ ID NO: 1376521 - RNA, 22 nt, Human
aagugcagcacgccuauggaaa

SEQ ID NO: 1376522 - RNA, 19 nt, Human
agcuuuggcccuuuuugcu

SEQ ID NO: 1376523 - RNA, 22 nt, Human
cagauuuacaaguuuggaugcu

SEQ ID NO: 1376524 - RNA, 22 nt, Human
cagcacgccuauggaaagcuuu

SEQ ID NO: 1376525 - RNA, 24 nt, Human
ccaagcaagugcagcacgccuaug

SEQ ID NO: 1376526 - RNA, 20 nt, Human
ccuauggaaagcuuuggccc

SEQ ID NO: 1376527 - RNA, 22 nt, Human
cgccuauggaaagcuuuggccc

SEQ ID NO: 1376528 - RNA, 19 nt, Human
cgugugccagugccagugc

SEQ ID NO: 1376529 - RNA, 23 nt, Human
ggaaagcuuuggcccuuuuugcu

SEQ ID NO: 1376530 - RNA, 19 nt, Human
uaccaagcaagugcagcac

SEQ ID NO: 1376531 - RNA, 19 nt, Human
ugccagugccagugcuggu

SEQ ID NO: 1376532 - RNA, 21 nt, Human
uuuggcccuuuuugcuaagcu

SEQ ID NO: 1376533 - RNA, 21 nt, Human
uuuggcccuuuuugcuaagcu

SEQ ID NO: 1376534 - RNA, 24 nt, Human
aagaaaaaaaaagagaucacacag

SEQ ID NO: 1376535 - RNA, 19 nt, Human
acauauauacacacauaua

SEQ ID NO: 1376536 - RNA, 22 nt, Human
accucuuccuucccuuggccac

SEQ ID NO: 1376537 - RNA, 19 nt, Human
agacaaacagaaagcagug

SEQ ID NO: 1376538 - RNA, 21 nt, Human
aggcaaaaagaaaaaaaaaga

SEQ ID NO: 1376539 - RNA, 26 nt, Human
aggcaaaaagaaaaaaaaagggaccc

SEQ ID NO: 1376540 - RNA, 19 nt, Human
auaaaguguacauauauac

SEQ ID NO: 1376541 - RNA, 24 nt, Human
auaagauugggucaaaagaugaga

SEQ ID NO: 1376542 - RNA, 21 nt, Human
auauacacacauaaacauaua

SEQ ID NO: 1376543 - RNA, 18 nt, Human
caaacagaaagcaguggc

SEQ ID NO: 1376544 - RNA, 23 nt, Human
cacuuugcaauauacaaugagca

SEQ ID NO: 1376545 - RNA, 19 nt, Human
cauauauacacacauauau

SEQ ID NO: 1376546 - RNA, 23 nt, Human
cauauauacacacauauauguau

SEQ ID NO: 1376547 - RNA, 25 nt, Human
ccugcuccuuuucuucccccagaug

SEQ ID NO: 1376548 - RNA, 24 nt, Human
gaccucuuccuucccuuggccacc

SEQ ID NO: 1376549 - RNA, 21 nt, Human
gaugcagauaggcaaaaagaa

SEQ ID NO: 1376550 - RNA, 19 nt, Human
gcacggcacgcuugucugc

SEQ ID NO: 1376551 - RNA, 24 nt, Human
gcaguggcaacauuaauaacagaa

SEQ ID NO: 1376552 - RNA, 19 nt, Human
ggagguuuacauuucauuu

SEQ ID NO: 1376553 - RNA, 18 nt, Human
ggcaaaaagaaaaaaaaa

SEQ ID NO: 1376554 - RNA, 19 nt, Human
ggcaguaaggagcugguac

SEQ ID NO: 1376555 - RNA, 23 nt, Human
guguacauauauacacacauaua

SEQ ID NO: 1376556 - RNA, 27 nt, Human
guguacauauauacacacauauaugua

SEQ ID NO: 1376557 - RNA, 24 nt, Human
uaaaugaauaagauugggucaaaa

SEQ ID NO: 1376558 - RNA, 20 nt, Human
uacacuguuuugcaacucgu

SEQ ID NO: 1376559 - RNA, 22 nt, Human
uauacacacauauauguauaca

SEQ ID NO: 1376560 - RNA, 24 nt, Human
uauacacacauauauguauacacu

SEQ ID NO: 1376561 - RNA, 23 nt, Human
uauauacacacauauauguauac

SEQ ID NO: 1376562 - RNA, 24 nt, Human
uauauacacacauauauguauaca

SEQ ID NO: 1376563 - RNA, 18 nt, Human
uaucaagaaagugcagac

SEQ ID NO: 1376564 - RNA, 23 nt, Human
uaucaagaaagugcagacaaaca

SEQ ID NO: 1376565 - RNA, 24 nt, Human
uaucaagaaagugcagacaaacag

SEQ ID NO: 1376566 - RNA, 19 nt, Human
ucaagaaagugcagacaaa

SEQ ID NO: 1376567 - RNA, 18 nt, Human
uccaugcaaaugaaugag

SEQ ID NO: 1376568 - RNA, 18 nt, Human
ucugugaacacagauccu

SEQ ID NO: 1376569 - RNA, 19 nt, Human
ugagaagaugcagauaggc

SEQ ID NO: 1376570 - RNA, 19 nt, Human
ugcuuaacucugugcgggg

SEQ ID NO: 1376571 - RNA, 19 nt, Human
uggcaacauuaauaacaga

SEQ ID NO: 1376572 - RNA, 22 nt, Human
uguacauauauacacacauaua

SEQ ID NO: 1376573 - RNA, 20 nt, Human
ugucugugaacacagauccu

SEQ ID NO: 1376574 - RNA, 21 nt, Human
uucacuguuaaccuuuggugu

SEQ ID NO: 1376575 - RNA, 25 nt, Human
uucauuuuuuggcaagugagaagau

SEQ ID NO: 1376576 - RNA, 21 nt, Human
uuguuguuguuuccugcuuaa

SEQ ID NO: 1376577 - RNA, 24 nt, Human
uuuccaugcaaaugaaugagacua

SEQ ID NO: 1376578 - RNA, 20 nt, Human
uuuccugcuccuuuucuucc

SEQ ID NO: 1376579 - RNA, 19 nt, Human
aaaaugcagggauuacagg

SEQ ID NO: 1376580 - RNA, 24 nt, Human
aaaaugcagggauuacagguguga

SEQ ID NO: 1376581 - RNA, 19 nt, Human
aaguaggugggauuacaga

SEQ ID NO: 1376582 - RNA, 20 nt, Human
aaguguaggacagggagggg

SEQ ID NO: 1376583 - RNA, 18 nt, Human
acagacgcacaccaccau

SEQ ID NO: 1376584 - RNA, 19 nt, Human
acgcacaccaccaugccca

SEQ ID NO: 1376585 - RNA, 25 nt, Human
acucuaaaacuuuugcaaaaacagg

SEQ ID NO: 1376586 - RNA, 24 nt, Human
acucuuguugcccaggcuggagug

SEQ ID NO: 1376587 - RNA, 23 nt, Human
agaugggguuucaucauauuggu

SEQ ID NO: 1376588 - RNA, 22 nt, Human
agggaggggcagaaucuacagg

SEQ ID NO: 1376589 - RNA, 20 nt, Human
agggagggggcagcggcggg

SEQ ID NO: 1376590 - RNA, 22 nt, Human
agggagggggcagcggcggguc

SEQ ID NO: 1376591 - RNA, 24 nt, Human
agggagggggcagcggcggguugg

SEQ ID NO: 1376592 - RNA, 22 nt, Human
agggauuacaggugugagccac

SEQ ID NO: 1376593 - RNA, 23 nt, Human
agggauuacaggugugagccacc

SEQ ID NO: 1376594 - RNA, 24 nt, Human
agggauuacaggugugagccacca

SEQ ID NO: 1376595 - RNA, 20 nt, Human
agggggcagcggcggguugg

SEQ ID NO: 1376596 - RNA, 21 nt, Human
agggggcagcggcggguugga

SEQ ID NO: 1376597 - RNA, 21 nt, Human
agguucaagugauucuccugc

SEQ ID NO: 1376598 - RNA, 22 nt, Human
agguucaagugauucuccugcc

SEQ ID NO: 1376599 - RNA, 22 nt, Human
aguacagaugggguuucaucau

SEQ ID NO: 1376600 - RNA, 24 nt, Human
agugauucuccugccucagucucc

SEQ ID NO: 1376601 - RNA, 24 nt, Human
aucauauuggucaggcuggucucg

SEQ ID NO: 1376602 - RNA, 20 nt, Human
augggguuucaucauauugg

SEQ ID NO: 1376603 - RNA, 23 nt, Human
augggguuucaucauauugguca

SEQ ID NO: 1376604 - RNA, 24 nt, Human
augggguuucaucauauuggucag

SEQ ID NO: 1376605 - RNA, 22 nt, Human
auuacugaugcuucacccagau

SEQ ID NO: 1376606 - RNA, 18 nt, Human
auucuccugccucagucu

SEQ ID NO: 1376607 - RNA, 24 nt, Human
caaaaaugcagggauuacaggugu

SEQ ID NO: 1376608 - RNA, 26 nt, Human
caaaugccacacgacuuggacgcagu

SEQ ID NO: 1376609 - RNA, 23 nt, Human
caagaaugagugaagugaagcca

SEQ ID NO: 1376610 - RNA, 21 nt, Human
caagugauucuccugccucag

SEQ ID NO: 1376611 - RNA, 28 nt, Human
caagugauucuccugccucagucuccca

SEQ ID NO: 1376612 - RNA, 24 nt, Human
cacaccaccaugcccagcuaauuu

SEQ ID NO: 1376613 - RNA, 24 nt, Human
caccaugcccagcuaauuuuugua

SEQ ID NO: 1376614 - RNA, 23 nt, Human
caccaugccuggccagcccacag

SEQ ID NO: 1376615 - RNA, 19 nt, Human
caccuagccgaacccaaag

SEQ ID NO: 1376616 - RNA, 18 nt, Human
cacugcaaccucugccuc

SEQ ID NO: 1376617 - RNA, 21 nt, Human
cacugcaaccucugccuccca

SEQ ID NO: 1376618 - RNA, 18 nt, Human
cagauacuugagguggug

SEQ ID NO: 1376619 - RNA, 25 nt, Human
cagccuccacuccauuuucauuacu

SEQ ID NO: 1376620 - RNA, 22 nt, Human
caggcuuauuucggaagcauua

SEQ ID NO: 1376621 - RNA, 18 nt, Human
cauauuggucaggcuggu

SEQ ID NO: 1376622 - RNA, 21 nt, Human
cauauuggucaggcuggucuc

SEQ ID NO: 1376623 - RNA, 24 nt, Human
caucauauuggucaggcuggucuc

SEQ ID NO: 1376624 - RNA, 19 nt, Human
cauugccacccacauucca

SEQ ID NO: 1376625 - RNA, 21 nt, Human
ccaaaugccacacgacuugga

SEQ ID NO: 1376626 - RNA, 18 nt, Human
ccaagcaaguguaggaca

SEQ ID NO: 1376627 - RNA, 18 nt, Human
ccacccaaaaaugcaggg

SEQ ID NO: 1376628 - RNA, 20 nt, Human
ccacgcaccucugccaccca

SEQ ID NO: 1376629 - RNA, 22 nt, Human
ccagcccacaggacuucuagcc

SEQ ID NO: 1376630 - RNA, 20 nt, Human
ccagucacucacauucccag

SEQ ID NO: 1376631 - RNA, 19 nt, Human
ccauuuucauuacugaugc

SEQ ID NO: 1376632 - RNA, 23 nt, Human
cccaaaaaugcagggauuacagg

SEQ ID NO: 1376633 - RNA, 21 nt, Human
cccaagagcaaagugauuacc

SEQ ID NO: 1376634 - RNA, 19 nt, Human
cccaaguaggugggauuac

SEQ ID NO: 1376635 - RNA, 23 nt, Human
cccagguucaagugauucuccuc

SEQ ID NO: 1376636 - RNA, 23 nt, Human
cccagguucaagugauucuccug

SEQ ID NO: 1376637 - RNA, 22 nt, Human
ccccaagagcaaagugauuacc

SEQ ID NO: 1376638 - RNA, 22 nt, Human
ccucaggugauccacgcaccuc

SEQ ID NO: 1376639 - RNA, 24 nt, Human
ccucccagguucaagugauucucc

SEQ ID NO: 1376640 - RNA, 19 nt, Human
ccucugccacccaaaaaug

SEQ ID NO: 1376641 - RNA, 20 nt, Human
ccugaccucaggugauccac

SEQ ID NO: 1376642 - RNA, 21 nt, Human
ccugaccucaggugauccacg

SEQ ID NO: 1376643 - RNA, 24 nt, Human
ccugaccucaggugauccacgcac

SEQ ID NO: 1376644 - RNA, 23 nt, Human
ccuuggccacgguuccccaagag

SEQ ID NO: 1376645 - RNA, 23 nt, Human
cgcacaccaccaugcccagcuaa

SEQ ID NO: 1376646 - RNA, 18 nt, Human
cgcaccucugccacccaa

SEQ ID NO: 1376647 - RNA, 21 nt, Human
cggguuggaacuacccaacuc

SEQ ID NO: 1376648 - RNA, 24 nt, Human
cucacugcaaccucugccucccag

SEQ ID NO: 1376649 - RNA, 24 nt, Human
cucacugcaaccucugccucccag

SEQ ID NO: 1376650 - RNA, 24 nt, Human
cucaggugauccacgcaccucugc

SEQ ID NO: 1376651 - RNA, 19 nt, Human
cucccagguucaagugauu

SEQ ID NO: 1376652 - RNA, 23 nt, Human
cucucaagaggcccaagaagcuu

SEQ ID NO: 1376653 - RNA, 18 nt, Human
cucuuguugcccaggcug

SEQ ID NO: 1376654 - RNA, 22 nt, Human
cucuuguugcccaggcuggagu

SEQ ID NO: 1376655 - RNA, 21 nt, Human
cugaugcuucacccagauggu

SEQ ID NO: 1376656 - RNA, 23 nt, Human
cugcaaccucugccucccagguu

SEQ ID NO: 1376657 - RNA, 24 nt, Human
cugcaaccucugccucccagguuc

SEQ ID NO: 1376658 - RNA, 23 nt, Human
cugcuggauuuuccacauccagc

SEQ ID NO: 1376659 - RNA, 24 nt, Human
cuggaguguaauagcaugaucucg

SEQ ID NO: 1376660 - RNA, 21 nt, Human
cuuacaagccucucaagaggc

SEQ ID NO: 1376661 - RNA, 23 nt, Human
cuucauggcugccacaccaugcc

SEQ ID NO: 1376662 - RNA, 24 nt, Human
cuuguugcccaggcuggaguguaa

SEQ ID NO: 1376663 - RNA, 18 nt, Human
cuuuggaggcagggcagc

SEQ ID NO: 1376664 - RNA, 27 nt, Human
gaacuacccaacucacuguacuacuua

SEQ ID NO: 1376665 - RNA, 24 nt, Human
gacagggagggggcagcggcgggu

SEQ ID NO: 1376666 - RNA, 24 nt, Human
gaccucaggugauccacgcaccuc

SEQ ID NO: 1376667 - RNA, 22 nt, Human
gauuacagacgcacaccaccau

SEQ ID NO: 1376668 - RNA, 18 nt, Human
gauuacaggugugagcca

SEQ ID NO: 1376669 - RNA, 21 nt, Human
gauuacaggugugagccacca

SEQ ID NO: 1376670 - RNA, 24 nt, Human
gauuacaggugugagccaccaugc

SEQ ID NO: 1376671 - RNA, 22 nt, Human
gcccagcuaauuuuuguauuuu

SEQ ID NO: 1376672 - RNA, 18 nt, Human
gccucagucucccaagua

SEQ ID NO: 1376673 - RNA, 18 nt, Human
gcugagccucuuuggagg

SEQ ID NO: 1376674 - RNA, 19 nt, Human
gcugccacaccaugccagg

SEQ ID NO: 1376675 - RNA, 23 nt, Human
gcuggucucgaacuccugaccuc

SEQ ID NO: 1376676 - RNA, 21 nt, Human
ggagaaaaacugagcaaggca

SEQ ID NO: 1376677 - RNA, 24 nt, Human
ggauuacaggugugagccaccaug

SEQ ID NO: 1376678 - RNA, 24 nt, Human
ggcuggucucgaacuccugaccuc

SEQ ID NO: 1376679 - RNA, 21 nt, Human
ggcuggugaaugggagacggc

SEQ ID NO: 1376680 - RNA, 18 nt, Human
gggacuucucaaucugaa

SEQ ID NO: 1376681 - RNA, 19 nt, Human
gggagggggcagcggcggg

SEQ ID NO: 1376682 - RNA, 22 nt, Human
gggagggggcagcggcggguug

SEQ ID NO: 1376683 - RNA, 23 nt, Human
gggauuacaggugugagccacca

SEQ ID NO: 1376684 - RNA, 24 nt, Human
gggauuacaggugugagccaccau

SEQ ID NO: 1376685 - RNA, 18 nt, Human
gggcagaagggaggggca

SEQ ID NO: 1376686 - RNA, 22 nt, Human
gggguuucaucauauuggucag

SEQ ID NO: 1376687 - RNA, 22 nt, Human
ggguuucaucauauuggucagg

SEQ ID NO: 1376688 - RNA, 19 nt, Human
ggucucgaacuccugaccu

SEQ ID NO: 1376689 - RNA, 19 nt, Human
guauuuuuaguacagaugg

SEQ ID NO: 1376690 - RNA, 22 nt, Human
guccacuuggaaacacgcugcc

SEQ ID NO: 1376691 - RNA, 20 nt, Human
guguccuauaaaagugggac

SEQ ID NO: 1376692 - RNA, 23 nt, Human
uaacccaagcaaguguaggacag

SEQ ID NO: 1376693 - RNA, 24 nt, Human
uaauuuuuguauuuuuaguacaga

SEQ ID NO: 1376694 - RNA, 22 nt, Human
uacaggugugagccaccaugcc

SEQ ID NO: 1376695 - RNA, 22 nt, Human
uacaggugugagccaccaugcc

SEQ ID NO: 1376696 - RNA, 21 nt, Human
uacuugaggugguggaaggga

SEQ ID NO: 1376697 - RNA, 23 nt, Human
uagcagcuggggccaccagucac

SEQ ID NO: 1376698 - RNA, 23 nt, Human
uaguacagaugggguuucaucau

SEQ ID NO: 1376699 - RNA, 24 nt, Human
uaguacagaugggguuucaucaua

SEQ ID NO: 1376700 - RNA, 24 nt, Human
uauagugcguggacacuggaaaag

SEQ ID NO: 1376701 - RNA, 31 nt, Human
uaucauggagccuccgacagauacuugaggg

SEQ ID NO: 1376702 - RNA, 24 nt, Human
ucaaaucagaaaagagaggccaac

SEQ ID NO: 1376703 - RNA, 19 nt, Human
ucaagugauucuccugccu

SEQ ID NO: 1376704 - RNA, 23 nt, Human
ucacucuuguugcccaggcugga

SEQ ID NO: 1376705 - RNA, 19 nt, Human
ucacugcaaccucugccuc

SEQ ID NO: 1376706 - RNA, 24 nt, Human
ucacugcaaccucugccucccagg

SEQ ID NO: 1376707 - RNA, 25 nt, Human
ucacugcaaccucugccucccaggu

SEQ ID NO: 1376708 - RNA, 23 nt, Human
ucagaaaagagaggccaacaacu

SEQ ID NO: 1376709 - RNA, 18 nt, Human
ucccagaagcagaagauc

SEQ ID NO: 1376710 - RNA, 21 nt, Human
ucccagguucaagugauucuc

SEQ ID NO: 1376711 - RNA, 24 nt, Human
ucccagguucaagugauucuccug

SEQ ID NO: 1376712 - RNA, 25 nt, Human
ucccuugcugagccucuuuggaggc

SEQ ID NO: 1376713 - RNA, 21 nt, Human
ucuaagacaucaucaaaccuu

SEQ ID NO: 1376714 - RNA, 23 nt, Human
ucuaagacaucaucaaaccuuag

SEQ ID NO: 1376715 - RNA, 18 nt, Human
ucuacaggacucagugaa

SEQ ID NO: 1376716 - RNA, 23 nt, Human
ucucgaacuccugaccucaggug

SEQ ID NO: 1376717 - RNA, 19 nt, Human
ucucugaacacaagaaccc

SEQ ID NO: 1376718 - RNA, 23 nt, Human
ucucugaacacaagaacccugga

SEQ ID NO: 1376719 - RNA, 22 nt, Human
ucuuguugcccaggcuggagug

SEQ ID NO: 1376720 - RNA, 21 nt, Human
ugaacacaagaacccuggaug

SEQ ID NO: 1376721 - RNA, 23 nt, Human
ugaccucaggugauccacgcacc

SEQ ID NO: 1376722 - RNA, 23 nt, Human
ugagacagaguuucacucuuguu

SEQ ID NO: 1376723 - RNA, 22 nt, Human
ugaggugguggaagggaagcag

SEQ ID NO: 1376724 - RNA, 19 nt, Human
ugccacacgacuuggacgc

SEQ ID NO: 1376725 - RNA, 23 nt, Human
ugccauacucaccuucugucuca

SEQ ID NO: 1376726 - RNA, 22 nt, Human
ugcccaggcuggaguguaauag

SEQ ID NO: 1376727 - RNA, 20 nt, Human
ugccucagucucccaaguag

SEQ ID NO: 1376728 - RNA, 21 nt, Human
ugcguucccagcucaagucac

SEQ ID NO: 1376729 - RNA, 19 nt, Human
ugcugagccucuuuggagg

SEQ ID NO: 1376730 - RNA, 24 nt, Human
uggaaaaggucaaugcagccucca

SEQ ID NO: 1376731 - RNA, 24 nt, Human
uggaaacacgcugccaaaugccac

SEQ ID NO: 1376732 - RNA, 18 nt, Human
uggaagggaagcagggcc

SEQ ID NO: 1376733 - RNA, 24 nt, Human
uggaguguaauagcaugaucucgg

SEQ ID NO: 1376734 - RNA, 21 nt, Human
ugggauuacagacgcacacca

SEQ ID NO: 1376735 - RNA, 22 nt, Human
ugggauuacagacgcacaccac

SEQ ID NO: 1376736 - RNA, 24 nt, Human
ugggauuacagacgcacaccacca

SEQ ID NO: 1376737 - RNA, 24 nt, Human
ugggguuucaucauauuggucagg

SEQ ID NO: 1376738 - RNA, 23 nt, Human
ugggucucugaacacaagaaccc

SEQ ID NO: 1376739 - RNA, 24 nt, Human
uggucaggcuggucucgaacuccu

SEQ ID NO: 1376740 - RNA, 18 nt, Human
uguaggacagggaggggg

SEQ ID NO: 1376741 - RNA, 26 nt, Human
uguaggacagggagggggcagcggcg

SEQ ID NO: 1376742 - RNA, 21 nt, Human
uguauuuuuaguacagauggg

SEQ ID NO: 1376743 - RNA, 20 nt, Human
uguugcccaggcuggagugu

SEQ ID NO: 1376744 - RNA, 22 nt, Human
uuacaagccucucaagaggccc

SEQ ID NO: 1376745 - RNA, 18 nt, Human
uuaguacagaugggguuu

SEQ ID NO: 1376746 - RNA, 20 nt, Human
uuaguacagaugggguuuca

SEQ ID NO: 1376747 - RNA, 24 nt, Human
uuaguacagaugggguuucaucau

SEQ ID NO: 1376748 - RNA, 21 nt, Human
uucaagugauucuccugccuc

SEQ ID NO: 1376749 - RNA, 23 nt, Human
uucaagugauucuccugccucag

SEQ ID NO: 1376750 - RNA, 25 nt, Human
uucaagugauucuccugccucaguc

SEQ ID NO: 1376751 - RNA, 24 nt, Human
uucacucuuguugcccaggcugga

SEQ ID NO: 1376752 - RNA, 18 nt, Human
uugcccaggcuggagugu

SEQ ID NO: 1376753 - RNA, 19 nt, Human
uuggaaaaugccaaacucu

SEQ ID NO: 1376754 - RNA, 23 nt, Human
uuguauuuuuaguacagaugggg

SEQ ID NO: 1376755 - RNA, 23 nt, Human
uuguuggaaaaugccaaacucua

SEQ ID NO: 1376756 - RNA, 24 nt, Human
uuucacucuuguugcccaggcugg

SEQ ID NO: 1376757 - RNA, 24 nt, Human
uuucaucauauuggucaggcuggu

SEQ ID NO: 1376758 - RNA, 23 nt, Human
uuuccacauccagcugacaguca

SEQ ID NO: 1376759 - RNA, 24 nt, Human
uuuuuaguacagaugggguuucau

SEQ ID NO: 1376760 - RNA, 20 nt, Human
uuuuuguauuuuuaguacag

SEQ ID NO: 1376761 - RNA, 23 nt, Human
uuuuuguauuuuuaguacagaug

SEQ ID NO: 1376762 - RNA, 24 nt, Human
aaagugcugggauuacaggcguga

SEQ ID NO: 1376763 - RNA, 24 nt, Human
aacagccuaauuggaccacaaaag

SEQ ID NO: 1376764 - RNA, 19 nt, Human
aagaagaaugaaaauggau

SEQ ID NO: 1376765 - RNA, 19 nt, Human
aagugcugggauuacaggc

SEQ ID NO: 1376766 - RNA, 19 nt, Human
aagugcugggauuacaggc

SEQ ID NO: 1376767 - RNA, 26 nt, Human
aagugcugggauuacaggcgugagcc

SEQ ID NO: 1376768 - RNA, 21 nt, Human
aauacugcaucaaaaggcaga

SEQ ID NO: 1376769 - RNA, 24 nt, Human
aaugaaaacugcauuagucaccac

SEQ ID NO: 1376770 - RNA, 22 nt, Human
acaggugugcaccaccacaccc

SEQ ID NO: 1376771 - RNA, 24 nt, Human
accauguuggccaaccuggucucg

SEQ ID NO: 1376772 - RNA, 23 nt, Human
accuggcuuccuguguaugccug

SEQ ID NO: 1376773 - RNA, 18 nt, Human
acuccguugcccaggcug

SEQ ID NO: 1376774 - RNA, 19 nt, Human
acuccguugcccaggcugg

SEQ ID NO: 1376775 - RNA, 26 nt, Human
acuccguugcccaggcugggagugca

SEQ ID NO: 1376776 - RNA, 20 nt, Human
acugcaucaaaaggcagaau

SEQ ID NO: 1376777 - RNA, 22 nt, Human
acugcuucauagaccccuccug

SEQ ID NO: 1376778 - RNA, 18 nt, Human
agaauuaagccccugagc

SEQ ID NO: 1376779 - RNA, 18 nt, Human
agccuccugaguagcuag

SEQ ID NO: 1376780 - RNA, 19 nt, Human
aggaagcugcagcccaccc

SEQ ID NO: 1376781 - RNA, 18 nt, Human
aggacaaggucugacaac

SEQ ID NO: 1376782 - RNA, 23 nt, Human
aggcggccgaccuucggcccgag

SEQ ID NO: 1376783 - RNA, 21 nt, Human
agugcaguggcacgaucucag

SEQ ID NO: 1376784 - RNA, 23 nt, Human
agugcaguggcacgaucucagcu

SEQ ID NO: 1376785 - RNA, 18 nt, Human
agugcugggauuacaggc

SEQ ID NO: 1376786 - RNA, 18 nt, Human
auggggucucaccauguu

SEQ ID NO: 1376787 - RNA, 20 nt, Human
auggggucucaccauguugg

SEQ ID NO: 1376788 - RNA, 19 nt, Human
auguccuccucucuucauc

SEQ ID NO: 1376789 - RNA, 24 nt, Human
caaagugcugggauuacaggcgug

SEQ ID NO: 1376790 - RNA, 22 nt, Human
caagcgauucuccugccucagc

SEQ ID NO: 1376791 - RNA, 21 nt, Human
cacagccucgccgccuccuuc

SEQ ID NO: 1376792 - RNA, 24 nt, Human
caccacacccggcuaauuuuugua

SEQ ID NO: 1376793 - RNA, 21 nt, Human
caccauguuggccaaccuggu

SEQ ID NO: 1376794 - RNA, 24 nt, Human
caccauguuggccaaccuggucuc

SEQ ID NO: 1376795 - RNA, 22 nt, Human
caccggggcgccgggacggcga

SEQ ID NO: 1376796 - RNA, 25 nt, Human
cacuccguugcccaggcugggagug

SEQ ID NO: 1376797 - RNA, 18 nt, Human
cacucugcauuugagagc

SEQ ID NO: 1376798 - RNA, 21 nt, Human
cacugcaaccuccgccuccca

SEQ ID NO: 1376799 - RNA, 24 nt, Human
cagaaugaaaacugcauuagucac

SEQ ID NO: 1376800 - RNA, 22 nt, Human
cagagauggggucucaccaugu

SEQ ID NO: 1376801 - RNA, 21 nt, Human
cagcacgcuggggagaagggu

SEQ ID NO: 1376802 - RNA, 22 nt, Human
cagccaggacaaggucugacaa

SEQ ID NO: 1376803 - RNA, 19 nt, Human
cagccuccugaguagcuag

SEQ ID NO: 1376804 - RNA, 20 nt, Human
ccaaagugcugggauuacag

SEQ ID NO: 1376805 - RNA, 22 nt, Human
ccaaagugcugggauuacaggc

SEQ ID NO: 1376806 - RNA, 22 nt, Human
ccaaagugcugggauuacaggc

SEQ ID NO: 1376807 - RNA, 24 nt, Human
ccaaagugcugggauuacaggcgu

SEQ ID NO: 1376808 - RNA, 22 nt, Human
ccaggacugcuucauagacccc

SEQ ID NO: 1376809 - RNA, 20 nt, Human
cccagguucaagcgauucuc

SEQ ID NO: 1376810 - RNA, 23 nt, Human
cccagguucaagcgauucuccug

SEQ ID NO: 1376811 - RNA, 24 nt, Human
ccccaggacugcuucauagacccc

SEQ ID NO: 1376812 - RNA, 27 nt, Human
ccccaggacugcuucauagaccccucc

SEQ ID NO: 1376813 - RNA, 21 nt, Human
ccccuccugcccuuuuuccuu

SEQ ID NO: 1376814 - RNA, 19 nt, Human
ccccugagcagccaggaca

SEQ ID NO: 1376815 - RNA, 25 nt, Human
ccccugagcagccaggacaaggucu

SEQ ID NO: 1376816 - RNA, 18 nt, Human
cccgugacauugcucgug

SEQ ID NO: 1376817 - RNA, 22 nt, Human
cccgugacauugcucguguccg

SEQ ID NO: 1376818 - RNA, 18 nt, Human
cccuccugcccuuuuucc

SEQ ID NO: 1376819 - RNA, 18 nt, Human
ccgcagggacgcggacac

SEQ ID NO: 1376820 - RNA, 21 nt, Human
ccgccgcacagccucgccgcc

SEQ ID NO: 1376821 - RNA, 22 nt, Human
ccgccgcacagccucgccgccu

SEQ ID NO: 1376822 - RNA, 24 nt, Human
ccgccucccagguucaagcgauuc

SEQ ID NO: 1376823 - RNA, 24 nt, Human
ccucccagguucaagcgauucucc

SEQ ID NO: 1376824 - RNA, 21 nt, Human
ccuccugcccuuuuuccuuca

SEQ ID NO: 1376825 - RNA, 22 nt, Human
ccugaccucaggugaucucccc

SEQ ID NO: 1376826 - RNA, 23 nt, Human
ccugccucagccuccugaguagc

SEQ ID NO: 1376827 - RNA, 20 nt, Human
ccuucggcccgaggcaccgg

SEQ ID NO: 1376828 - RNA, 18 nt, Human
ccuugccccgggggcagg

SEQ ID NO: 1376829 - RNA, 23 nt, Human
cgccgggacggcgaagaugucgg

SEQ ID NO: 1376830 - RNA, 24 nt, Human
cgccucggccucccaaagugcugg

SEQ ID NO: 1376831 - RNA, 23 nt, Human
cuaauuuuuguauuuuuagcaga

SEQ ID NO: 1376832 - RNA, 24 nt, Human
cucacugcaaccuccgccucccag

SEQ ID NO: 1376833 - RNA, 24 nt, Human
cuccugaguagcuaggauaacagg

SEQ ID NO: 1376834 - RNA, 23 nt, Human
cugcaaccuccgccucccagguu

SEQ ID NO: 1376835 - RNA, 24 nt, Human
cugcaaccuccgccucccagguuc

SEQ ID NO: 1376836 - RNA, 23 nt, Human
cugccucagccuccugaguagcu

SEQ ID NO: 1376837 - RNA, 23 nt, Human
cuggcuuccuguguaugccuggg

SEQ ID NO: 1376838 - RNA, 23 nt, Human
cuggucucgaacuccugaccucc

SEQ ID NO: 1376839 - RNA, 18 nt, Human
cugugagcaagaggaagc

SEQ ID NO: 1376840 - RNA, 19 nt, Human
cuuaggggaaaaaaaaaag

SEQ ID NO: 1376841 - RNA, 24 nt, Human
gaccucaggugaucuccccgccuc

SEQ ID NO: 1376842 - RNA, 18 nt, Human
gaggcaccggggcgccgg

SEQ ID NO: 1376843 - RNA, 18 nt, Human
gauuacaggcgugagcca

SEQ ID NO: 1376844 - RNA, 21 nt, Human
gauuacaggcgugagccacgc

SEQ ID NO: 1376845 - RNA, 21 nt, Human
gauucuccugccucagccucc

SEQ ID NO: 1376846 - RNA, 22 nt, Human
gcaaccuccgccucccagguuc

SEQ ID NO: 1376847 - RNA, 21 nt, Human
gccgcacagccucgccgccuc

SEQ ID NO: 1376848 - RNA, 20 nt, Human
gccgggaguggggccgcagg

SEQ ID NO: 1376849 - RNA, 22 nt, Human
gccuccggccccucuuugcaac

SEQ ID NO: 1376850 - RNA, 24 nt, Human
gcgauucuccugccucagccuccu

SEQ ID NO: 1376851 - RNA, 21 nt, Human
ggcccgaggcaccggggcgcc

SEQ ID NO: 1376852 - RNA, 25 nt, Human
ggcugggagugcaguggcacgaucu

SEQ ID NO: 1376853 - RNA, 22 nt, Human
ggcuuaggggaaaaaaaaaagc

SEQ ID NO: 1376854 - RNA, 21 nt, Human
gggacgcggacacgucagacc

SEQ ID NO: 1376855 - RNA, 19 nt, Human
gggagugcaguggcacgau

SEQ ID NO: 1376856 - RNA, 19 nt, Human
gggaguggggccgcaggga

SEQ ID NO: 1376857 - RNA, 22 nt, Human
gggcagcccucacccuggugag

SEQ ID NO: 1376858 - RNA, 18 nt, Human
ggggucucaccauguugg

SEQ ID NO: 1376859 - RNA, 21 nt, Human
gggucucaccauguuggccaa

SEQ ID NO: 1376860 - RNA, 18 nt, Human
ggucacggcggccgggag

SEQ ID NO: 1376861 - RNA, 18 nt, Human
ggucucaccauguuggcc

SEQ ID NO: 1376862 - RNA, 19 nt, Human
ggucucgaacuccugaccu

SEQ ID NO: 1376863 - RNA, 20 nt, Human
ggucucgaacuccugaccuc

SEQ ID NO: 1376864 - RNA, 24 nt, Human
gugaucuccccgccucggccuccc

SEQ ID NO: 1376865 - RNA, 23 nt, Human
uaagcucccagugcaggguugac

SEQ ID NO: 1376866 - RNA, 24 nt, Human
uaauuuuuguauuuuuagcagaga

SEQ ID NO: 1376867 - RNA, 22 nt, Human
uacaggcgugagccacgcgccc

SEQ ID NO: 1376868 - RNA, 20 nt, Human
uacugcaucaaaaggcagag

SEQ ID NO: 1376869 - RNA, 24 nt, Human
uagcagagauggggucucaccaug

SEQ ID NO: 1376870 - RNA, 26 nt, Human
uagcagagauggggucucaccauguu

SEQ ID NO: 1376871 - RNA, 19 nt, Human
ucaccgccuaugauggugu

SEQ ID NO: 1376872 - RNA, 19 nt, Human
ucacugcaaccuccgccuc

SEQ ID NO: 1376873 - RNA, 24 nt, Human
ucacugcaaccuccgccucccagg

SEQ ID NO: 1376874 - RNA, 25 nt, Human
ucacugcaaccuccgccucccaggu

SEQ ID NO: 1376875 - RNA, 27 nt, Human
ucacugcaaccuccgccucccagguuc

SEQ ID NO: 1376876 - RNA, 19 nt, Human
ucagaaacugcaggagauc

SEQ ID NO: 1376877 - RNA, 27 nt, Human
ucagcucacugcaaccuccgccuccca

SEQ ID NO: 1376878 - RNA, 24 nt, Human
ucccaaagugcugggauuacaggc

SEQ ID NO: 1376879 - RNA, 21 nt, Human
ucccagguucaagcgauucuc

SEQ ID NO: 1376880 - RNA, 24 nt, Human
ucccagguucaagcgauucuccug

SEQ ID NO: 1376881 - RNA, 25 nt, Human
ucccuggccccucuuuaccuggcuu

SEQ ID NO: 1376882 - RNA, 18 nt, Human
ucgcggcgcgcggcgggg

SEQ ID NO: 1376883 - RNA, 18 nt, Human
ucggccucccaaagugcu

SEQ ID NO: 1376884 - RNA, 21 nt, Human
ucucaccauguuggccaaccu

SEQ ID NO: 1376885 - RNA, 23 nt, Human
ucucacuccguugcccaggcugg

SEQ ID NO: 1376886 - RNA, 23 nt, Human
ucucacuccguugcccaggcugg

SEQ ID NO: 1376887 - RNA, 24 nt, Human
ucucacuccguugcccaggcuggg

SEQ ID NO: 1376888 - RNA, 24 nt, Human
ucucacuccguugcccaggcuggg

SEQ ID NO: 1376889 - RNA, 25 nt, Human
ucucacuccguugcccaggcuggga

SEQ ID NO: 1376890 - RNA, 24 nt, Human
ucuccugccucagccuccugagua

SEQ ID NO: 1376891 - RNA, 19 nt, Human
ucucgaacuccugaccuca

SEQ ID NO: 1376892 - RNA, 19 nt, Human
ugaccucaggugaucuccc

SEQ ID NO: 1376893 - RNA, 20 nt, Human
ugaccucaggugaucucccc

SEQ ID NO: 1376894 - RNA, 21 nt, Human
ugaccucaggugaucuccccg

SEQ ID NO: 1376895 - RNA, 24 nt, Human
ugaccucaggugaucuccccgccu

SEQ ID NO: 1376896 - RNA, 22 nt, Human
ugcaguggcacgaucucagcuc

SEQ ID NO: 1376897 - RNA, 25 nt, Human
ugccaguaucucauucuucccuggc

SEQ ID NO: 1376898 - RNA, 19 nt, Human
ugcccaggcugggagugca

SEQ ID NO: 1376899 - RNA, 23 nt, Human
ugccucagccuccugaguagcua

SEQ ID NO: 1376900 - RNA, 24 nt, Human
ugccucagccuccugaguagcuag

SEQ ID NO: 1376901 - RNA, 22 nt, Human
ugcgguaacgccaugcucuuaa

SEQ ID NO: 1376902 - RNA, 24 nt, Human
ugcugggauuacaggcgugagcca

SEQ ID NO: 1376903 - RNA, 18 nt, Human
uggauguagaugucuggg

SEQ ID NO: 1376904 - RNA, 24 nt, Human
uggcacgaucucagcucacugcaa

SEQ ID NO: 1376905 - RNA, 24 nt, Human
uggccaaccuggucucgaacuccu

SEQ ID NO: 1376906 - RNA, 18 nt, Human
ugggauuacaggcgugag

SEQ ID NO: 1376907 - RNA, 19 nt, Human
ugggauuacaggcgugagc

SEQ ID NO: 1376908 - RNA, 21 nt, Human
ugggauuacaggcgugagcca

SEQ ID NO: 1376909 - RNA, 22 nt, Human
ugggauuacaggcgugagccac

SEQ ID NO: 1376910 - RNA, 22 nt, Human
ugggauuacaggcgugagccac

SEQ ID NO: 1376911 - RNA, 23 nt, Human
ugggauuacaggcgugagccacg

SEQ ID NO: 1376912 - RNA, 27 nt, Human
ugggauuacaggcgugagccacgcgcc

SEQ ID NO: 1376913 - RNA, 19 nt, Human
uggggucucaccauguugg

SEQ ID NO: 1376914 - RNA, 23 nt, Human
uggggucucaccauguuggccaa

SEQ ID NO: 1376915 - RNA, 21 nt, Human
uguauuuuuagcagagauggg

SEQ ID NO: 1376916 - RNA, 24 nt, Human
uuagcagagauggggucucaccau

SEQ ID NO: 1376917 - RNA, 21 nt, Human
uucaagcgauucuccugccuc

SEQ ID NO: 1376918 - RNA, 23 nt, Human
uucaagcgauucuccugccucag

SEQ ID NO: 1376919 - RNA, 24 nt, Human
uucaagcgauucuccugccucagc

SEQ ID NO: 1376920 - RNA, 19 nt, Human
uucccacauucaaacacug

SEQ ID NO: 1376921 - RNA, 25 nt, Human
uugcccaggcugggagugcaguggc

SEQ ID NO: 1376922 - RNA, 23 nt, Human
uuguauuuuuagcagagaugggg

SEQ ID NO: 1376923 - RNA, 24 nt, Human
uuuuuagcagagauggggucucac

SEQ ID NO: 1376924 - RNA, 20 nt, Human
uuuuuguauuuuuagcagag

SEQ ID NO: 1376925 - RNA, 23 nt, Human
uuuuuguauuuuuagcagagaug

SEQ ID NO: 1376926 - RNA, 22 nt, Human
aaagaaacugccaccugccccu

SEQ ID NO: 1376927 - RNA, 20 nt, Human
aacagaacguaccaauuaac

SEQ ID NO: 1376928 - RNA, 18 nt, Human
aacaguggagcauccuuc

SEQ ID NO: 1376929 - RNA, 24 nt, Human
aagagcuggcccaaggacucaggg

SEQ ID NO: 1376930 - RNA, 18 nt, Human
aaggacucagggucuggg

SEQ ID NO: 1376931 - RNA, 24 nt, Human
aaggggccuggagauggcagcagg

SEQ ID NO: 1376932 - RNA, 19 nt, Human
acagaacguaccaauuaac

SEQ ID NO: 1376933 - RNA, 24 nt, Human
acauugucuuaauucucaagacaa

SEQ ID NO: 1376934 - RNA, 18 nt, Human
agagaugggguccccacc

SEQ ID NO: 1376935 - RNA, 26 nt, Human
agagaugugcauuuuucacaaacucc

SEQ ID NO: 1376936 - RNA, 19 nt, Human
agagcccuuccugacacac

SEQ ID NO: 1376937 - RNA, 23 nt, Human
aggcaggugggcaaggggcuggg

SEQ ID NO: 1376938 - RNA, 23 nt, Human
aggccagaggcaggugggcaagg

SEQ ID NO: 1376939 - RNA, 22 nt, Human
aggccagggcugaagaggggga

SEQ ID NO: 1376940 - RNA, 21 nt, Human
aggccccagagcucauaggug

SEQ ID NO: 1376941 - RNA, 20 nt, Human
aggcuuugggaggcuaggcc

SEQ ID NO: 1376942 - RNA, 19 nt, Human
agggaggggagacugacag

SEQ ID NO: 1376943 - RNA, 21 nt, Human
aggugguagagcagaggccca

SEQ ID NO: 1376944 - RNA, 21 nt, Human
caccugccccuuuugccccca

SEQ ID NO: 1376945 - RNA, 19 nt, Human
cagaguccuccagcccauc

SEQ ID NO: 1376946 - RNA, 23 nt, Human
cagaguccuccagcccauccucu

SEQ ID NO: 1376947 - RNA, 18 nt, Human
cagcagggggucagcucu

SEQ ID NO: 1376948 - RNA, 22 nt, Human
cagcccagcauuaauccaugcc

SEQ ID NO: 1376949 - RNA, 21 nt, Human
caggaaaggcagggcagcagc

SEQ ID NO: 1376950 - RNA, 19 nt, Human
caggcuuugggaggcuagg

SEQ ID NO: 1376951 - RNA, 22 nt, Human
caugcaugccugccugccuccc

SEQ ID NO: 1376952 - RNA, 23 nt, Human
ccaacauccagaguccuccagcc

SEQ ID NO: 1376953 - RNA, 27 nt, Human
ccaacauccagaguccuccagcccauc

SEQ ID NO: 1376954 - RNA, 28 nt, Human
ccacaugcaugccugccugccucccucc

SEQ ID NO: 1376955 - RNA, 20 nt, Human
ccacccaggagccagaacag

SEQ ID NO: 1376956 - RNA, 20 nt, Human
ccagagcucauaggugguag

SEQ ID NO: 1376957 - RNA, 19 nt, Human
ccagaggcaggugggcaag

SEQ ID NO: 1376958 - RNA, 23 nt, Human
ccaggauugaggaaaaccaguuc

SEQ ID NO: 1376959 - RNA, 22 nt, Human
ccccacccaggagccagaacag

SEQ ID NO: 1376960 - RNA, 19 nt, Human
ccuccagcccauccucugc

SEQ ID NO: 1376961 - RNA, 18 nt, Human
ccucccguccagccugac

SEQ ID NO: 1376962 - RNA, 22 nt, Human
ccuccuggucuuagccaagagc

SEQ ID NO: 1376963 - RNA, 20 nt, Human
ccugcagguaaggggccugg

SEQ ID NO: 1376964 - RNA, 19 nt, Human
cuccccauuggccagcccc

SEQ ID NO: 1376965 - RNA, 21 nt, Human
cuccccauuggccagccccaa

SEQ ID NO: 1376966 - RNA, 20 nt, Human
cugacacacagccggagagg

SEQ ID NO: 1376967 - RNA, 24 nt, Human
cuugcagccuccuggucuuagcca

SEQ ID NO: 1376968 - RNA, 20 nt, Human
gaacagggaguuggggaacc

SEQ ID NO: 1376969 - RNA, 22 nt, Human
gaaccagagucaggcuuuggga

SEQ ID NO: 1376970 - RNA, 22 nt, Human
gagaacaacgggagcaaagagc

SEQ ID NO: 1376971 - RNA, 23 nt, Human
gagccagaacagggaguugggga

SEQ ID NO: 1376972 - RNA, 24 nt, Human
gcccccaggaaaggcagggcagca

SEQ ID NO: 1376973 - RNA, 19 nt, Human
gcuaggccagggcugaaga

SEQ ID NO: 1376974 - RNA, 30 nt, Human
ggaaggccagaggcaggugggcaaggggcc

SEQ ID NO: 1376975 - RNA, 20 nt, Human
ggccccagagcucauaggug

SEQ ID NO: 1376976 - RNA, 18 nt, Human
gggcaaggggcuggguuu

SEQ ID NO: 1376977 - RNA, 23 nt, Human
gggcugaagagggggaggcaaau

SEQ ID NO: 1376978 - RNA, 18 nt, Human
ggggcuggauagccgggg

SEQ ID NO: 1376979 - RNA, 21 nt, Human
gucagcucugcgcaccccucu

SEQ ID NO: 1376980 - RNA, 23 nt, Human
gucagcucugcgcaccccucugg

SEQ ID NO: 1376981 - RNA, 18 nt, Human
gucaggcuuugggaggcu

SEQ ID NO: 1376982 - RNA, 23 nt, Human
gucccugagagauggggucccca

SEQ ID NO: 1376983 - RNA, 18 nt, Human
guggagcauccuucagaa

SEQ ID NO: 1376984 - RNA, 23 nt, Human
guuguucccuucuagguccaagg

SEQ ID NO: 1376985 - RNA, 22 nt, Human
uaaauaacucgugucaggcccc

SEQ ID NO: 1376986 - RNA, 22 nt, Human
uaacaacagaacguaccaauua

SEQ ID NO: 1376987 - RNA, 25 nt, Human
uaaggggccuggagauggcagcagg

SEQ ID NO: 1376988 - RNA, 23 nt, Human
ucagaacacgauaucugagucag

SEQ ID NO: 1376989 - RNA, 22 nt, Human
ucccaaaggugacggcaaugcc

SEQ ID NO: 1376990 - RNA, 21 nt, Human
ucccugcagguaaggggccug

SEQ ID NO: 1376991 - RNA, 21 nt, Human
uccuaaccugaaccaagaggu

SEQ ID NO: 1376992 - RNA, 22 nt, Human
uccuucagaacacgauaucuga

SEQ ID NO: 1376993 - RNA, 28 nt, Human
ucugaggcugaaaaagaaaccggggucc

SEQ ID NO: 1376994 - RNA, 23 nt, Human
ugacacacagccggagaggccag

SEQ ID NO: 1376995 - RNA, 21 nt, Human
ugacucagcaggucugggcag

SEQ ID NO: 1376996 - RNA, 18 nt, Human
ugagagauggggucccca

SEQ ID NO: 1376997 - RNA, 21 nt, Human
ugaggaaaaccaguucugagg

SEQ ID NO: 1376998 - RNA, 18 nt, Human
ugaguagcaagggguuca

SEQ ID NO: 1376999 - RNA, 23 nt, Human
ugccgauuguccauggacuacac

SEQ ID NO: 1377000 - RNA, 18 nt, Human
uggauagccgggggucgu

SEQ ID NO: 1377001 - RNA, 21 nt, Human
ugggagcugggagggucccug

SEQ ID NO: 1377002 - RNA, 19 nt, Human
ugggcaaaggucaugauug

SEQ ID NO: 1377003 - RNA, 21 nt, Human
uuaacugaccguguacugggu

SEQ ID NO: 1377004 - RNA, 18 nt, Human
aaaagggagugaggcaca

SEQ ID NO: 1377005 - RNA, 19 nt, Human
aaaagggagugaggcacag

SEQ ID NO: 1377006 - RNA, 21 nt, Human
aaacagcuauaaauuaaccua

SEQ ID NO: 1377007 - RNA, 24 nt, Human
aaagugcugagacuacaggccugg

SEQ ID NO: 1377008 - RNA, 20 nt, Human
aacaugagaaaagucaccau

SEQ ID NO: 1377009 - RNA, 27 nt, Human
aacccacagcuacaaaaaaggaaaguc

SEQ ID NO: 1377010 - RNA, 19 nt, Human
aagugcugagacuacaggc

SEQ ID NO: 1377011 - RNA, 18 nt, Human
acagugugaaccaggggu

SEQ ID NO: 1377012 - RNA, 18 nt, Human
acagugugaaccaggggu

SEQ ID NO: 1377013 - RNA, 24 nt, Human
accaggaguucaugggaauucuuc

SEQ ID NO: 1377014 - RNA, 24 nt, Human
accagggguucaugggaauucuuc

SEQ ID NO: 1377015 - RNA, 24 nt, Human
accagggguucaugggaauucuuc

SEQ ID NO: 1377016 - RNA, 25 nt, Human
acccacacucaauagcugaacaaca

SEQ ID NO: 1377017 - RNA, 22 nt, Human
acguaaauuccagacaaacgua

SEQ ID NO: 1377018 - RNA, 21 nt, Human
agaaacugaaaaacugugacu

SEQ ID NO: 1377019 - RNA, 22 nt, Human
agaaagcagcagagauagucaa

SEQ ID NO: 1377020 - RNA, 25 nt, Human
agaaggcagaggugaggccugcaaa

SEQ ID NO: 1377021 - RNA, 19 nt, Human
agaauaggcucagagagac

SEQ ID NO: 1377022 - RNA, 24 nt, Human
agacaaacguagaaaguggcuccu

SEQ ID NO: 1377023 - RNA, 23 nt, Human
agagauagucaaaaacccacagc

SEQ ID NO: 1377024 - RNA, 26 nt, Human
aggacaaagauacauaguaaaaaaaa

SEQ ID NO: 1377025 - RNA, 20 nt, Human
agggagugaggcacagaagg

SEQ ID NO: 1377026 - RNA, 22 nt, Human
aggugaggccugcaaacagcag

SEQ ID NO: 1377027 - RNA, 26 nt, Human
aguguccacacauccaauuagaugac

SEQ ID NO: 1377028 - RNA, 21 nt, Human
auuucuguaaaccagugagaa

SEQ ID NO: 1377029 - RNA, 23 nt, Human
caaaaaaugcacuccuaagagca

SEQ ID NO: 1377030 - RNA, 24 nt, Human
caaaaaaugcacuccuaagagcaa

SEQ ID NO: 1377031 - RNA, 24 nt, Human
caaagugcugagacuacaggccug

SEQ ID NO: 1377032 - RNA, 23 nt, Human
caaguuccuauuaguccacuccc

SEQ ID NO: 1377033 - RNA, 19 nt, Human
cacugugccccuucugggc

SEQ ID NO: 1377034 - RNA, 19 nt, Human
cacuguguggccaaagacu

SEQ ID NO: 1377035 - RNA, 19 nt, Human
cacuguguggccaaagacu

SEQ ID NO: 1377036 - RNA, 21 nt, Human
cagcuacaaaaaaugcacucc

SEQ ID NO: 1377037 - RNA, 19 nt, Human
caggccagccugggccugc

SEQ ID NO: 1377038 - RNA, 25 nt, Human
caggccgagagagacauucaaauga

SEQ ID NO: 1377039 - RNA, 24 nt, Human
cauaaaggcucucucgugagcacc

SEQ ID NO: 1377040 - RNA, 21 nt, Human
cauccaauuagaugacuguuc

SEQ ID NO: 1377041 - RNA, 20 nt, Human
ccaaagugcugagacuacag

SEQ ID NO: 1377042 - RNA, 21 nt, Human
ccacacauccaauuagaugac

SEQ ID NO: 1377043 - RNA, 23 nt, Human
ccacacucaauagcugaacaaca

SEQ ID NO: 1377044 - RNA, 20 nt, Human
ccacagccucccgaagugcu

SEQ ID NO: 1377045 - RNA, 20 nt, Human
ccacagcuacaaaaaaugca

SEQ ID NO: 1377046 - RNA, 19 nt, Human
ccagagcggucuggcucag

SEQ ID NO: 1377047 - RNA, 21 nt, Human
ccaggcucaggugauccgccc

SEQ ID NO: 1377048 - RNA, 22 nt, Human
ccagugccacuguguggccaaa

SEQ ID NO: 1377049 - RNA, 18 nt, Human
cccaaauaaacucucuac

SEQ ID NO: 1377050 - RNA, 25 nt, Human
cccaaauaaacucucuacuuagaga

SEQ ID NO: 1377051 - RNA, 21 nt, Human
cccacaauccccauuuuuuaa

SEQ ID NO: 1377052 - RNA, 18 nt, Human
cccaggcucaggugaucc

SEQ ID NO: 1377053 - RNA, 24 nt, Human
ccgccacagccucccgaagugcug

SEQ ID NO: 1377054 - RNA, 21 nt, Human
cgaagugcugagccucccaaa

SEQ ID NO: 1377055 - RNA, 23 nt, Human
cggucuggcucaggccagccugg

SEQ ID NO: 1377056 - RNA, 21 nt, Human
cucccaaagugcugagacuac

SEQ ID NO: 1377057 - RNA, 21 nt, Human
cugagccucccaaagugcuga

SEQ ID NO: 1377058 - RNA, 19 nt, Human
cuggccgcccgcccgccag

SEQ ID NO: 1377059 - RNA, 24 nt, Human
cugggccugccgaguagcugggac

SEQ ID NO: 1377060 - RNA, 22 nt, Human
gaauaggcucagagagacucca

SEQ ID NO: 1377061 - RNA, 23 nt, Human
gccacagccucccgaagugcuga

SEQ ID NO: 1377062 - RNA, 20 nt, Human
ggaauucuucaccauccagu

SEQ ID NO: 1377063 - RNA, 20 nt, Human
ggaauucuucaccauccagu

SEQ ID NO: 1377064 - RNA, 20 nt, Human
ggaauucuucaucauccagu

SEQ ID NO: 1377065 - RNA, 19 nt, Human
ggacagaaaagggagugag

SEQ ID NO: 1377066 - RNA, 25 nt, Human
gggaauucuucaccauccagugguc

SEQ ID NO: 1377067 - RNA, 25 nt, Human
gggaauucuucaucauccagugguc

SEQ ID NO: 1377068 - RNA, 21 nt, Human
ggggggaaaagcaaauacagg

SEQ ID NO: 1377069 - RNA, 19 nt, Human
gugaggcacagaaggcaga

SEQ ID NO: 1377070 - RNA, 20 nt, Human
gugaggccugcaaacagcag

SEQ ID NO: 1377071 - RNA, 24 nt, Human
gugauccgcccgccacagccuccc

SEQ ID NO: 1377072 - RNA, 19 nt, Human
gugcugagccucccaaagu

SEQ ID NO: 1377073 - RNA, 23 nt, Human
gugcugagccucccaaagugcug

SEQ ID NO: 1377074 - RNA, 18 nt, Human
uaaaaggcacugugcccc

SEQ ID NO: 1377075 - RNA, 20 nt, Human
uaacaugagaaaagucacca

SEQ ID NO: 1377076 - RNA, 23 nt, Human
uaaccuaaugacgccacaaugga

SEQ ID NO: 1377077 - RNA, 19 nt, Human
uaaggcugaaaaaauuaaa

SEQ ID NO: 1377078 - RNA, 18 nt, Human
uaauuaccacauuuaaau

SEQ ID NO: 1377079 - RNA, 19 nt, Human
uacaguguccacacaucca

SEQ ID NO: 1377080 - RNA, 18 nt, Human
uacaguuggaaccaggag

SEQ ID NO: 1377081 - RNA, 24 nt, Human
uacguugcgcaggcuggucuccaa

SEQ ID NO: 1377082 - RNA, 22 nt, Human
uagagauagggucuugcuacgu

SEQ ID NO: 1377083 - RNA, 24 nt, Human
uagggucuugcuacguugcgcagg

SEQ ID NO: 1377084 - RNA, 24 nt, Human
uaguaaaaaaaaaauucuggcagg

SEQ ID NO: 1377085 - RNA, 22 nt, Human
ucaccauauaaaagugaggggg

SEQ ID NO: 1377086 - RNA, 22 nt, Human
ucagggcgccuugaauuugugc

SEQ ID NO: 1377087 - RNA, 20 nt, Human
uccaguagucuguaaauguu

SEQ ID NO: 1377088 - RNA, 20 nt, Human
uccaguggucuguaaauguu

SEQ ID NO: 1377089 - RNA, 24 nt, Human
ucccaaagugcugagacuacaggc

SEQ ID NO: 1377090 - RNA, 18 nt, Human
ucccaggcucaggugauc

SEQ ID NO: 1377091 - RNA, 20 nt, Human
ucccaggcucaggugauccg

SEQ ID NO: 1377092 - RNA, 21 nt, Human
uccgcccgccacagccucccg

SEQ ID NO: 1377093 - RNA, 20 nt, Human
uccucacaaacaaguuccua

SEQ ID NO: 1377094 - RNA, 21 nt, Human
ucgcgcccuacuaccccuuga

SEQ ID NO: 1377095 - RNA, 26 nt, Human
ucggaguacacauucagggcgccuug

SEQ ID NO: 1377096 - RNA, 20 nt, Human
ucuggcagguauuaaggcug

SEQ ID NO: 1377097 - RNA, 23 nt, Human
ucuugcuacguugcgcaggcugg

SEQ ID NO: 1377098 - RNA, 24 nt, Human
ucuugcuacguugcgcaggcuggu

SEQ ID NO: 1377099 - RNA, 21 nt, Human
ugaaucuguuuuagagauagg

SEQ ID NO: 1377100 - RNA, 18 nt, Human
ugacugauucaagaguag

SEQ ID NO: 1377101 - RNA, 23 nt, Human
ugagaaaagucaccauauaaaag

SEQ ID NO: 1377102 - RNA, 19 nt, Human
ugagacuacaggccuggcc

SEQ ID NO: 1377103 - RNA, 19 nt, Human
ugagacuacaggccuggcc

SEQ ID NO: 1377104 - RNA, 21 nt, Human
ugagcaccgcacguuuucccu

SEQ ID NO: 1377105 - RNA, 24 nt, Human
ugcccaugcugaguagucuguccu

SEQ ID NO: 1377106 - RNA, 24 nt, Human
ugcuacguugcgcaggcuggucuc

SEQ ID NO: 1377107 - RNA, 23 nt, Human
uggacacuauacccacacucaau

SEQ ID NO: 1377108 - RNA, 19 nt, Human
uggcaacagcgccacaaac

SEQ ID NO: 1377109 - RNA, 22 nt, Human
uggcuacagcucgugucuggcu

SEQ ID NO: 1377110 - RNA, 20 nt, Human
ugguuuugagaaaagagaau

SEQ ID NO: 1377111 - RNA, 28 nt, Human
ugugacugcuggagccauuuucccacaa

SEQ ID NO: 1377112 - RNA, 24 nt, Human
uguugcccaugcuuuaguuuuguu

SEQ ID NO: 1377113 - RNA, 18 nt, Human
uuaguccacucccuggcc

SEQ ID NO: 1377114 - RNA, 18 nt, Human
uuuaaacugcuacuggug

SEQ ID NO: 1377115 - RNA, 23 nt, Human
aaaaaaucagaacugagcauugc

SEQ ID NO: 1377116 - RNA, 22 nt, Human
acgcuguccucaucauccuccc

SEQ ID NO: 1377117 - RNA, 18 nt, Human
acgugagugguuucuuuc

SEQ ID NO: 1377118 - RNA, 19 nt, Human
acugccuccucugcaccgg

SEQ ID NO: 1377119 - RNA, 21 nt, Human
agaagcguguccuauguucau

SEQ ID NO: 1377120 - RNA, 23 nt, Human
agaagcguguccuauguucaugg

SEQ ID NO: 1377121 - RNA, 19 nt, Human
agccaaggccgaguccucc

SEQ ID NO: 1377122 - RNA, 19 nt, Human
agccugugaugaacacugc

SEQ ID NO: 1377123 - RNA, 21 nt, Human
agggcgcugagcaacagaaaa

SEQ ID NO: 1377124 - RNA, 21 nt, Human
agugcuuuuccaagcucaccu

SEQ ID NO: 1377125 - RNA, 21 nt, Human
augguucucccccuccuugcc

SEQ ID NO: 1377126 - RNA, 22 nt, Human
caaauacauuaagugaaacacc

SEQ ID NO: 1377127 - RNA, 19 nt, Human
cagugagcuuguccuuguu

SEQ ID NO: 1377128 - RNA, 19 nt, Human
caguguucucagauuuucc

SEQ ID NO: 1377129 - RNA, 23 nt, Human
cauuuuggcucugccccucugga

SEQ ID NO: 1377130 - RNA, 22 nt, Human
ccagcgucugccggcuucucuc

SEQ ID NO: 1377131 - RNA, 22 nt, Human
cccgcacccugcucccugcuuc

SEQ ID NO: 1377132 - RNA, 18 nt, Human
cccugagcccuaugcuaa

SEQ ID NO: 1377133 - RNA, 18 nt, Human
ccgcacccugcucccugc

SEQ ID NO: 1377134 - RNA, 21 nt, Human
ccgcacccugcucccugcuuc

SEQ ID NO: 1377135 - RNA, 21 nt, Human
ccuccuugccuccucccuacu

SEQ ID NO: 1377136 - RNA, 18 nt, Human
ccucuacagacagaagcg

SEQ ID NO: 1377137 - RNA, 19 nt, Human
ccuuaugcuugguaccucc

SEQ ID NO: 1377138 - RNA, 22 nt, Human
cggcuucucuccagcagcucca

SEQ ID NO: 1377139 - RNA, 26 nt, Human
cucaaaacauuaaaaaaaaaaaaauc

SEQ ID NO: 1377140 - RNA, 18 nt, Human
cuccagcagcuccagccc

SEQ ID NO: 1377141 - RNA, 20 nt, Human
cuccagcagcuccagccucc

SEQ ID NO: 1377142 - RNA, 21 nt, Human
cuccucccuacuccaccucug

SEQ ID NO: 1377143 - RNA, 21 nt, Human
cuccuuguucucacugcccac

SEQ ID NO: 1377144 - RNA, 21 nt, Human
cucucuagccugugaugaaca

SEQ ID NO: 1377145 - RNA, 20 nt, Human
cucugcaccgggcucaccgc

SEQ ID NO: 1377146 - RNA, 23 nt, Human
cugacgucggagggguucuucuc

SEQ ID NO: 1377147 - RNA, 18 nt, Human
cugagcuccaccaccucc

SEQ ID NO: 1377148 - RNA, 19 nt, Human
cugccccucuggaagaucc

SEQ ID NO: 1377149 - RNA, 19 nt, Human
cugccccucuggaagaucc

SEQ ID NO: 1377150 - RNA, 22 nt, Human
cugcuucugagcuccugucugc

SEQ ID NO: 1377151 - RNA, 18 nt, Human
gaaacaccaaagcuuaga

SEQ ID NO: 1377152 - RNA, 19 nt, Human
ggcuucucuccagcagcuc

SEQ ID NO: 1377153 - RNA, 19 nt, Human
gucucauaugaagccucua

SEQ ID NO: 1377154 - RNA, 20 nt, Human
guucucagauuuuccccagc

SEQ ID NO: 1377155 - RNA, 23 nt, Human
ucaaaacauuaaaaaaaaaaaaa

SEQ ID NO: 1377156 - RNA, 19 nt, Human
ucacugcccaccuucuucu

SEQ ID NO: 1377157 - RNA, 23 nt, Human
ucagagcccacgcuguccucauc

SEQ ID NO: 1377158 - RNA, 20 nt, Human
ucaucauccucccgcacccu

SEQ ID NO: 1377159 - RNA, 23 nt, Human
uccaucuuuccagggcagugagc

SEQ ID NO: 1377160 - RNA, 20 nt, Human
ucccugcuucugagcuccug

SEQ ID NO: 1377161 - RNA, 24 nt, Human
uccguugucucuucuuagccaagg

SEQ ID NO: 1377162 - RNA, 22 nt, Human
ucucauuuuggcucugccccuc

SEQ ID NO: 1377163 - RNA, 18 nt, Human
ucuccuccagcgucugcc

SEQ ID NO: 1377164 - RNA, 24 nt, Human
ucucuguauccucauccugcgaug

SEQ ID NO: 1377165 - RNA, 18 nt, Human
ucugagcuccugucugcc

SEQ ID NO: 1377166 - RNA, 22 nt, Human
ugaaacaccaaagcuuagaggg

SEQ ID NO: 1377167 - RNA, 18 nt, Human
ugagugguggcaacgugu

SEQ ID NO: 1377168 - RNA, 20 nt, Human
ugaugaacacugccaaauac

SEQ ID NO: 1377169 - RNA, 18 nt, Human
ugccaggagaggucagac

SEQ ID NO: 1377170 - RNA, 22 nt, Human
ugccaggagaggucagacuugc

SEQ ID NO: 1377171 - RNA, 19 nt, Human
ugcccaccuucuucuggug

SEQ ID NO: 1377172 - RNA, 21 nt, Human
ugcccugagcccuaugcuaac

SEQ ID NO: 1377173 - RNA, 22 nt, Human
uucaguguucucagauuuuccc

SEQ ID NO: 1377174 - RNA, 24 nt, Human
uucaguguucucagauuuucccca

SEQ ID NO: 1377175 - RNA, 20 nt, Human
uuccaucuuuccagggcagu

SEQ ID NO: 1377176 - RNA, 21 nt, Human
uucguauugaugguucucccc

SEQ ID NO: 1377177 - RNA, 23 nt, Human
uucucacugcccaccuucuucug

SEQ ID NO: 1377178 - RNA, 24 nt, Human
uucucccccuccuugccuccuccc

SEQ ID NO: 1377179 - RNA, 19 nt, Human
uucugagcuccugucugcc

SEQ ID NO: 1377180 - RNA, 22 nt, Human
uucugguguuucagcuuccagg

SEQ ID NO: 1377181 - RNA, 18 nt, Human
uuggcucugccccucugg

SEQ ID NO: 1377182 - RNA, 23 nt, Human
uugguaccucucauuuuggcucu

SEQ ID NO: 1377183 - RNA, 21 nt, Human
aaagaccagggugcaaguucc

SEQ ID NO: 1377184 - RNA, 23 nt, Human
aaccugucccaccauuguggcgu

SEQ ID NO: 1377185 - RNA, 22 nt, Human
aagcagagaaggcaaaaggaga

SEQ ID NO: 1377186 - RNA, 27 nt, Human
acaccaggccccccaccacccgcugga

SEQ ID NO: 1377187 - RNA, 22 nt, Human
accugcggagaggggguaccag

SEQ ID NO: 1377188 - RNA, 19 nt, Human
acgaacugcgauaugaaca

SEQ ID NO: 1377189 - RNA, 19 nt, Human
acuguguccauguaaguag

SEQ ID NO: 1377190 - RNA, 20 nt, Human
agaaaaaggagauuugugua

SEQ ID NO: 1377191 - RNA, 23 nt, Human
agacuggaaccaggguugcagga

SEQ ID NO: 1377192 - RNA, 22 nt, Human
agauagaggcuucuacagaaau

SEQ ID NO: 1377193 - RNA, 26 nt, Human
agaugaugcuguguugguuuguaugg

SEQ ID NO: 1377194 - RNA, 19 nt, Human
agcuuccgaaugguuuccu

SEQ ID NO: 1377195 - RNA, 23 nt, Human
aggggucugcaaaauagugcagu

SEQ ID NO: 1377196 - RNA, 24 nt, Human
aggguugcaggaccacgcagucac

SEQ ID NO: 1377197 - RNA, 21 nt, Human
agugccuuucggaugggugac

SEQ ID NO: 1377198 - RNA, 20 nt, Human
aucuggcugcuuccugcugg

SEQ ID NO: 1377199 - RNA, 21 nt, Human
auggaagugugcauaucuucu

SEQ ID NO: 1377200 - RNA, 21 nt, Human
auuguugugaaaauggggugg

SEQ ID NO: 1377201 - RNA, 18 nt, Human
caaaaggagaaaaaggag

SEQ ID NO: 1377202 - RNA, 20 nt, Human
caaaauagugcaguuugggc

SEQ ID NO: 1377203 - RNA, 22 nt, Human
cacaccaggccccccaccaccc

SEQ ID NO: 1377204 - RNA, 18 nt, Human
cacagcucaggcccuggu

SEQ ID NO: 1377205 - RNA, 24 nt, Human
cacagcucaggcccugguggaauu

SEQ ID NO: 1377206 - RNA, 26 nt, Human
cagaagcuauuaggugaaggagggca

SEQ ID NO: 1377207 - RNA, 21 nt, Human
cagcagccaggucuacaaugc

SEQ ID NO: 1377208 - RNA, 19 nt, Human
cagcggacccugggccccg

SEQ ID NO: 1377209 - RNA, 19 nt, Human
cagcuagugccagagcccc

SEQ ID NO: 1377210 - RNA, 20 nt, Human
cagcucaggucagguuccgg

SEQ ID NO: 1377211 - RNA, 24 nt, Human
cagggguccuaggaagggggcaac

SEQ ID NO: 1377212 - RNA, 21 nt, Human
ccagcacaccaggccccccac

SEQ ID NO: 1377213 - RNA, 20 nt, Human
ccagugccaagugcagcagu

SEQ ID NO: 1377214 - RNA, 24 nt, Human
ccauaagcagagaaggcaaaagga

SEQ ID NO: 1377215 - RNA, 21 nt, Human
ccauccaacugcaugucacuc

SEQ ID NO: 1377216 - RNA, 23 nt, Human
cccaccacccgcuggaagcacag

SEQ ID NO: 1377217 - RNA, 21 nt, Human
ccccagcucaggucagguucc

SEQ ID NO: 1377218 - RNA, 20 nt, Human
cccgcuggaagcacaggccc

SEQ ID NO: 1377219 - RNA, 20 nt, Human
ccuggauaaaacaauucagc

SEQ ID NO: 1377220 - RNA, 22 nt, Human
ccuucugccaggcagaggugga

SEQ ID NO: 1377221 - RNA, 20 nt, Human
ccuucugccaggcagagguu

SEQ ID NO: 1377222 - RNA, 19 nt, Human
cggaugggugacuucugga

SEQ ID NO: 1377223 - RNA, 18 nt, Human
cggucugaacucuuggcc

SEQ ID NO: 1377224 - RNA, 23 nt, Human
cugaaaccaugcugagagagcug

SEQ ID NO: 1377225 - RNA, 19 nt, Human
gacuuaauacguggugugu

SEQ ID NO: 1377226 - RNA, 20 nt, Human
gagccugaaagaccagggug

SEQ ID NO: 1377227 - RNA, 21 nt, Human
gagcuuccgaaugguuuccuc

SEQ ID NO: 1377228 - RNA, 20 nt, Human
gagguccaggacucuccagu

SEQ ID NO: 1377229 - RNA, 23 nt, Human
gagguggugauggcggugggggc

SEQ ID NO: 1377230 - RNA, 21 nt, Human
gauuaggguagguucggcuga

SEQ ID NO: 1377231 - RNA, 23 nt, Human
gcaggaccacgcagucaccgcca

SEQ ID NO: 1377232 - RNA, 21 nt, Human
gcaguuugggcuaacauucuu

SEQ ID NO: 1377233 - RNA, 18 nt, Human
gccccagcucaggucagg

SEQ ID NO: 1377234 - RNA, 19 nt, Human
gccccagcucaggucaggu

SEQ ID NO: 1377235 - RNA, 20 nt, Human
gcuugccagacuggaaccag

SEQ ID NO: 1377236 - RNA, 18 nt, Human
ggagaggggguaccagcu

SEQ ID NO: 1377237 - RNA, 22 nt, Human
ggccccgucagucuucagcagc

SEQ ID NO: 1377238 - RNA, 18 nt, Human
ggcggugggggcagcgga

SEQ ID NO: 1377239 - RNA, 22 nt, Human
gggcaggagaggucugggauug

SEQ ID NO: 1377240 - RNA, 23 nt, Human
gggcguugugauuagggccuggg

SEQ ID NO: 1377241 - RNA, 18 nt, Human
ggggaagggguaccagga

SEQ ID NO: 1377242 - RNA, 24 nt, Human
ggggcccagcugucagugauuggg

SEQ ID NO: 1377243 - RNA, 18 nt, Human
ggggguggggacucagaa

SEQ ID NO: 1377244 - RNA, 24 nt, Human
ggguggggauaugaaggaaguuug

SEQ ID NO: 1377245 - RNA, 20 nt, Human
gguucuggagcuuccgaaug

SEQ ID NO: 1377246 - RNA, 21 nt, Human
gugaaggagggcaacagcccu

SEQ ID NO: 1377247 - RNA, 18 nt, Human
guggggauaugaaggaag

SEQ ID NO: 1377248 - RNA, 19 nt, Human
guuagaggagaggggagau

SEQ ID NO: 1377249 - RNA, 19 nt, Human
guuccgagguggugauggc

SEQ ID NO: 1377250 - RNA, 23 nt, Human
uacccuggguuccgaggugguga

SEQ ID NO: 1377251 - RNA, 21 nt, Human
uagaaaggguugugaauagug

SEQ ID NO: 1377252 - RNA, 21 nt, Human
uagggccuggguucuggagcu

SEQ ID NO: 1377253 - RNA, 20 nt, Human
ucagccaagaaugguauagc

SEQ ID NO: 1377254 - RNA, 19 nt, Human
ucagugauugggggugggg

SEQ ID NO: 1377255 - RNA, 23 nt, Human
ucagugguuaggagguccaggac

SEQ ID NO: 1377256 - RNA, 23 nt, Human
ucccgggcaggagaggucuggga

SEQ ID NO: 1377257 - RNA, 23 nt, Human
uccuugccaccaggagucagcga

SEQ ID NO: 1377258 - RNA, 22 nt, Human
ucuuggccacaagaucuaagcc

SEQ ID NO: 1377259 - RNA, 19 nt, Human
ugaaauccuggaaggugcc

SEQ ID NO: 1377260 - RNA, 19 nt, Human
ugaagaggagauagaggcu

SEQ ID NO: 1377261 - RNA, 20 nt, Human
ugaagccuacgaacugcgau

SEQ ID NO: 1377262 - RNA, 18 nt, Human
ugacagcguuacccuggg

SEQ ID NO: 1377263 - RNA, 22 nt, Human
ugacagcguuacccuggguucc

SEQ ID NO: 1377264 - RNA, 21 nt, Human
ugacuuaauacguggugugug

SEQ ID NO: 1377265 - RNA, 18 nt, Human
ugaggugguuaugccugc

SEQ ID NO: 1377266 - RNA, 21 nt, Human
ugaguuugaaggaaagguguu

SEQ ID NO: 1377267 - RNA, 23 nt, Human
ugcagccagggguuaggccuggg

SEQ ID NO: 1377268 - RNA, 20 nt, Human
ugccagacuggaaccagggu

SEQ ID NO: 1377269 - RNA, 25 nt, Human
ugccuuucggaugggugacuucugg

SEQ ID NO: 1377270 - RNA, 23 nt, Human
uggaagugugcauaucuucuacg

SEQ ID NO: 1377271 - RNA, 23 nt, Human
uggcggugggggcagcggacccu

SEQ ID NO: 1377272 - RNA, 21 nt, Human
uggcgugggcuggauuagggu

SEQ ID NO: 1377273 - RNA, 19 nt, Human
ugggaccugccugacagga

SEQ ID NO: 1377274 - RNA, 18 nt, Human
ugggggcgguguguuugg

SEQ ID NO: 1377275 - RNA, 26 nt, Human
uggggugggggcgguguguuuggcug

SEQ ID NO: 1377276 - RNA, 22 nt, Human
ugguaauggaagugugcauauc

SEQ ID NO: 1377277 - RNA, 20 nt, Human
ugucaaagcucugcagcccu

SEQ ID NO: 1377278 - RNA, 21 nt, Human
ugucaugaagccuacgaacug

SEQ ID NO: 1377279 - RNA, 25 nt, Human
ugugaaaauggggugggggcggugu

SEQ ID NO: 1377280 - RNA, 23 nt, Human
uguguccauguaaguaggucagc

SEQ ID NO: 1377281 - RNA, 18 nt, Human
uucaggaaugaaucagcc

SEQ ID NO: 1377282 - RNA, 30 nt, Human
uucccgcuuacaggcuggaccaguuacagg

SEQ ID NO: 1377283 - RNA, 19 nt, Human
uugaaggaugacucccacg

SEQ ID NO: 1377284 - RNA, 22 nt, Human
uugaugccagcacaccaggccc

SEQ ID NO: 1377285 - RNA, 22 nt, Human
uugcaggaccacgcagucaccg

SEQ ID NO: 1377286 - RNA, 18 nt, Human
uuggaaguggagaguguc

SEQ ID NO: 1377287 - RNA, 22 nt, Human
aaagagaaaacggugaacuuaa

SEQ ID NO: 1377288 - RNA, 24 nt, Human
aaagugcugggauuacagguguga

SEQ ID NO: 1377289 - RNA, 21 nt, Human
aagggguuucaccauauuggu

SEQ ID NO: 1377290 - RNA, 24 nt, Human
aagggguuucaccauauuggucag

SEQ ID NO: 1377291 - RNA, 18 nt, Human
aagugcugggauuacagg

SEQ ID NO: 1377292 - RNA, 19 nt, Human
aagugcugggauuacaggu

SEQ ID NO: 1377293 - RNA, 26 nt, Human
aagugcugggauuacaggugugagcc

SEQ ID NO: 1377294 - RNA, 21 nt, Human
aauauggugaaaccccaucuc

SEQ ID NO: 1377295 - RNA, 24 nt, Human
aaucgcuugaacccgggaggugga

SEQ ID NO: 1377296 - RNA, 23 nt, Human
accauauuggucaggcuggucuc

SEQ ID NO: 1377297 - RNA, 24 nt, Human
accccaucucuacuaaaaauacaa

SEQ ID NO: 1377298 - RNA, 23 nt, Human
acccugugaacccugugaaauga

SEQ ID NO: 1377299 - RNA, 18 nt, Human
accuagcacuuugggagg

SEQ ID NO: 1377300 - RNA, 21 nt, Human
accuagcacuuugggaggcca

SEQ ID NO: 1377301 - RNA, 20 nt, Human
acggcacuccagccuggggg

SEQ ID NO: 1377302 - RNA, 24 nt, Human
acggcacuccagccugggggacgg

SEQ ID NO: 1377303 - RNA, 22 nt, Human
acuccagccugggggacgguga

SEQ ID NO: 1377304 - RNA, 23 nt, Human
acuccagggaguguucguugagg

SEQ ID NO: 1377305 - RNA, 18 nt, Human
acuccuaaaucaacaccu

SEQ ID NO: 1377306 - RNA, 24 nt, Human
acuugaggucaggaguuugagacc

SEQ ID NO: 1377307 - RNA, 23 nt, Human
agcacuuugggaggccaaggcag

SEQ ID NO: 1377308 - RNA, 19 nt, Human
agccuggccaauaugguga

SEQ ID NO: 1377309 - RNA, 22 nt, Human
agccuggccaauauggugaaac

SEQ ID NO: 1377310 - RNA, 24 nt, Human
agccuggccaauauggugaaaccc

SEQ ID NO: 1377311 - RNA, 22 nt, Human
agccugggggacggugagacuc

SEQ ID NO: 1377312 - RNA, 23 nt, Human
agcuggguguggugucaggugcc

SEQ ID NO: 1377313 - RNA, 23 nt, Human
agcuuccugugcuaguggcaagu

SEQ ID NO: 1377314 - RNA, 20 nt, Human
aggaguuugagaccagccug

SEQ ID NO: 1377315 - RNA, 24 nt, Human
aggcaggagaaucgcuugaacccg

SEQ ID NO: 1377316 - RNA, 18 nt, Human
aggcaggcggaucacuug

SEQ ID NO: 1377317 - RNA, 26 nt, Human
aggcaggcggaucacuugaggucagg

SEQ ID NO: 1377318 - RNA, 20 nt, Human
aggcugaggcaggagaaucg

SEQ ID NO: 1377319 - RNA, 24 nt, Human
aggcugaggcaggagaaucgcuug

SEQ ID NO: 1377320 - RNA, 20 nt, Human
agggcacagcgcagccaggc

SEQ ID NO: 1377321 - RNA, 24 nt, Human
agguggagguugcagugagcugag

SEQ ID NO: 1377322 - RNA, 24 nt, Human
agugcaauggugucaucuuggcuc

SEQ ID NO: 1377323 - RNA, 20 nt, Human
agugcugggauuacaggugu

SEQ ID NO: 1377324 - RNA, 24 nt, Human
aguuacaggcaugcaccaccaugc

SEQ ID NO: 1377325 - RNA, 24 nt, Human
aucacgccacggcacuccagccug

SEQ ID NO: 1377326 - RNA, 19 nt, Human
augccuguaaaccuagcac

SEQ ID NO: 1377327 - RNA, 20 nt, Human
auggugaaaccccaucucua

SEQ ID NO: 1377328 - RNA, 24 nt, Human
caaagugcugggauuacaggugug

SEQ ID NO: 1377329 - RNA, 22 nt, Human
caagcgauucuccugccucagc

SEQ ID NO: 1377330 - RNA, 28 nt, Human
caagcgauucuccugccucagcauccca

SEQ ID NO: 1377331 - RNA, 26 nt, Human
caaggcacacauucugacauuaacuu

SEQ ID NO: 1377332 - RNA, 24 nt, Human
caaggcaggcggaucacuugaggu

SEQ ID NO: 1377333 - RNA, 26 nt, Human
caaggcaggcggaucacuugagguca

SEQ ID NO: 1377334 - RNA, 24 nt, Human
caauauggugaaaccccaucucua

SEQ ID NO: 1377335 - RNA, 21 nt, Human
cacaccccugcagauaaacac

SEQ ID NO: 1377336 - RNA, 21 nt, Human
cacagcgcagccaggcgcggc

SEQ ID NO: 1377337 - RNA, 22 nt, Human
caccaccaugccuggcuaauuu

SEQ ID NO: 1377338 - RNA, 21 nt, Human
caccauauuggucaggcuggu

SEQ ID NO: 1377339 - RNA, 24 nt, Human
caccauauuggucaggcuggucuc

SEQ ID NO: 1377340 - RNA, 22 nt, Human
cacggcacuccagccuggggga

SEQ ID NO: 1377341 - RNA, 23 nt, Human
cacggcacuccagccugggggac

SEQ ID NO: 1377342 - RNA, 21 nt, Human
cacuccagccugggggacggu

SEQ ID NO: 1377343 - RNA, 22 nt, Human
cacuccuuccaaauaacacucc

SEQ ID NO: 1377344 - RNA, 23 nt, Human
cacuugaggucaggaguuugaga

SEQ ID NO: 1377345 - RNA, 22 nt, Human
cagauaaacacagaagucacca

SEQ ID NO: 1377346 - RNA, 23 nt, Human
cagauaaacacagaagucaccau

SEQ ID NO: 1377347 - RNA, 23 nt, Human
cagcgcagccaggcgcggcccca

SEQ ID NO: 1377348 - RNA, 24 nt, Human
cagcuacucgggaggcugaggcag

SEQ ID NO: 1377349 - RNA, 26 nt, Human
caggugacccacccaacuuggugucc

SEQ ID NO: 1377350 - RNA, 23 nt, Human
cauagaaagagaaaacggugaac

SEQ ID NO: 1377351 - RNA, 24 nt, Human
caugccuguaaaccuagcacuuug

SEQ ID NO: 1377352 - RNA, 20 nt, Human
ccaaagugcugggauuacag

SEQ ID NO: 1377353 - RNA, 21 nt, Human
ccaaagugcugggauuacagg

SEQ ID NO: 1377354 - RNA, 21 nt, Human
ccaaagugcugggauuacagg

SEQ ID NO: 1377355 - RNA, 24 nt, Human
ccaaagugcugggauuacaggugu

SEQ ID NO: 1377356 - RNA, 24 nt, Human
ccaaguaucuggaguuacaggcau

SEQ ID NO: 1377357 - RNA, 19 nt, Human
ccacccaacuugguguccc

SEQ ID NO: 1377358 - RNA, 20 nt, Human
ccacggcacuccagccuggg

SEQ ID NO: 1377359 - RNA, 24 nt, Human
ccacggcacuccagccugggggac

SEQ ID NO: 1377360 - RNA, 22 nt, Human
ccaggcgcggccccagcccacg

SEQ ID NO: 1377361 - RNA, 22 nt, Human
ccauaccacaacuauucuccua

SEQ ID NO: 1377362 - RNA, 19 nt, Human
cccagcccacgucugaggc

SEQ ID NO: 1377363 - RNA, 20 nt, Human
cccaggcuggagugcaaugg

SEQ ID NO: 1377364 - RNA, 21 nt, Human
cccgggagguggagguugcag

SEQ ID NO: 1377365 - RNA, 22 nt, Human
ccucaggugacccacccaacuu

SEQ ID NO: 1377366 - RNA, 20 nt, Human
ccugaccucaggugacccac

SEQ ID NO: 1377367 - RNA, 24 nt, Human
ccugaccucaggugacccacccaa

SEQ ID NO: 1377368 - RNA, 21 nt, Human
ccugcaaucccagcuacucgg

SEQ ID NO: 1377369 - RNA, 22 nt, Human
ccugcaaucccagcuacucggg

SEQ ID NO: 1377370 - RNA, 22 nt, Human
ccugcagcggucggccaggagc

SEQ ID NO: 1377371 - RNA, 23 nt, Human
ccuggccaauauggugaaacccc

SEQ ID NO: 1377372 - RNA, 24 nt, Human
ccuggccaauauggugaaacccca

SEQ ID NO: 1377373 - RNA, 23 nt, Human
cgccacggcacuccagccugggg

SEQ ID NO: 1377374 - RNA, 24 nt, Human
cggaucacuugaggucaggaguuu

SEQ ID NO: 1377375 - RNA, 27 nt, Human
cggaucacuugaggucaggaguuugag

SEQ ID NO: 1377376 - RNA, 29 nt, Human
cgggagguggagguugcagugacaacggu

SEQ ID NO: 1377377 - RNA, 24 nt, Human
cgggagguggagguugcagugagc

SEQ ID NO: 1377378 - RNA, 26 nt, Human
cuaauuuuguauuuuuuuaguagaga

SEQ ID NO: 1377379 - RNA, 24 nt, Human
cucaugccuguaaaccuagcacuu

SEQ ID NO: 1377380 - RNA, 23 nt, Human
cucucuuguugcccaggcuggag

SEQ ID NO: 1377381 - RNA, 24 nt, Human
cucucuuguugcccaggcuggagu

SEQ ID NO: 1377382 - RNA, 18 nt, Human
cucuuguugcccaggcug

SEQ ID NO: 1377383 - RNA, 21 nt, Human
cucuuguugcccaggcuggag

SEQ ID NO: 1377384 - RNA, 19 nt, Human
cugcagauaaacacagaag

SEQ ID NO: 1377385 - RNA, 19 nt, Human
cuucacguaguaccagaac

SEQ ID NO: 1377386 - RNA, 24 nt, Human
cuucucucuuguugcccaggcugg

SEQ ID NO: 1377387 - RNA, 22 nt, Human
gaaaacggugaacuuaaccccc

SEQ ID NO: 1377388 - RNA, 18 nt, Human
gaccucaggugacccacc

SEQ ID NO: 1377389 - RNA, 24 nt, Human
gagaagggguuucaccauauuggu

SEQ ID NO: 1377390 - RNA, 23 nt, Human
gagaaucgcuugaacccgggagg

SEQ ID NO: 1377391 - RNA, 23 nt, Human
gagaucacgccacggcacuccag

SEQ ID NO: 1377392 - RNA, 22 nt, Human
gagguugcagugagcugagauc

SEQ ID NO: 1377393 - RNA, 24 nt, Human
gaucacuugaggucaggaguuuga

SEQ ID NO: 1377394 - RNA, 19 nt, Human
gaugcaaggaaaauccaga

SEQ ID NO: 1377395 - RNA, 18 nt, Human
gauuacaggugugagcca

SEQ ID NO: 1377396 - RNA, 22 nt, Human
gauuacaggugugagccacugc

SEQ ID NO: 1377397 - RNA, 22 nt, Human
gauuacaggugugagccacugc

SEQ ID NO: 1377398 - RNA, 20 nt, Human
gcaccaccaugccuggcuaa

SEQ ID NO: 1377399 - RNA, 24 nt, Human
gccaauauggugaaaccccaucuc

SEQ ID NO: 1377400 - RNA, 23 nt, Human
gcgcagccaggcgcggccccagc

SEQ ID NO: 1377401 - RNA, 21 nt, Human
gcggaucacuugaggucagga

SEQ ID NO: 1377402 - RNA, 23 nt, Human
gcuggucucaaacuccugaccuc

SEQ ID NO: 1377403 - RNA, 18 nt, Human
ggagguugcagugagcug

SEQ ID NO: 1377404 - RNA, 22 nt, Human
ggagguugcagugagcugagau

SEQ ID NO: 1377405 - RNA, 23 nt, Human
ggagguugcagugagcugagauc

SEQ ID NO: 1377406 - RNA, 24 nt, Human
ggagguugcagugagcugagauca

SEQ ID NO: 1377407 - RNA, 22 nt, Human
ggaucacuugaggucaggaguu

SEQ ID NO: 1377408 - RNA, 22 nt, Human
ggaucacuugaggucaggaguu

SEQ ID NO: 1377409 - RNA, 18 nt, Human
ggcucaugccuguaaacc

SEQ ID NO: 1377410 - RNA, 19 nt, Human
ggcugggcuugguggcuca

SEQ ID NO: 1377411 - RNA, 23 nt, Human
ggcugggcuugguggcucaugcc

SEQ ID NO: 1377412 - RNA, 24 nt, Human
ggcuggucucaaacuccugaccuc

SEQ ID NO: 1377413 - RNA, 20 nt, Human
ggcuugguggcucaugccug

SEQ ID NO: 1377414 - RNA, 24 nt, Human
gggcuugguggcucaugccuguaa

SEQ ID NO: 1377415 - RNA, 24 nt, Human
ggggaggcugggcuugguggcuca

SEQ ID NO: 1377416 - RNA, 18 nt, Human
gggguuucaccauauugg

SEQ ID NO: 1377417 - RNA, 22 nt, Human
gggguuucaccauauuggucag

SEQ ID NO: 1377418 - RNA, 23 nt, Human
gggguuucaccauauuggucagg

SEQ ID NO: 1377419 - RNA, 22 nt, Human
ggguuucaccauauuggucagg

SEQ ID NO: 1377420 - RNA, 19 nt, Human
ggucaggaguuugagacca

SEQ ID NO: 1377421 - RNA, 21 nt, Human
ggugcaguggauauuacagcu

SEQ ID NO: 1377422 - RNA, 19 nt, Human
gguggagguugcagugagc

SEQ ID NO: 1377423 - RNA, 24 nt, Human
gguggcucaugccuguaaaccuag

SEQ ID NO: 1377424 - RNA, 18 nt, Human
gucaucuuggcucugccu

SEQ ID NO: 1377425 - RNA, 20 nt, Human
gugcuaguggcaagucagau

SEQ ID NO: 1377426 - RNA, 23 nt, Human
gugcuuguugaggaccuccuuca

SEQ ID NO: 1377427 - RNA, 20 nt, Human
guggagguugcagugagcug

SEQ ID NO: 1377428 - RNA, 19 nt, Human
guugcagugagcugagauc

SEQ ID NO: 1377429 - RNA, 21 nt, Human
uaaaagcacaaggggaggcug

SEQ ID NO: 1377430 - RNA, 25 nt, Human
uaaaccuagcacuuugggaggccaa

SEQ ID NO: 1377431 - RNA, 25 nt, Human
uaacacuccuuccaaauaacacucc

SEQ ID NO: 1377432 - RNA, 24 nt, Human
uaauuuuguauuuuuuuaguagag

SEQ ID NO: 1377433 - RNA, 22 nt, Human
uacaggcaugcaccaccaugcc

SEQ ID NO: 1377434 - RNA, 22 nt, Human
uacaggugugagccacugcgcc

SEQ ID NO: 1377435 - RNA, 23 nt, Human
uacaggugugagccacugcgccu

SEQ ID NO: 1377436 - RNA, 20 nt, Human
uaccacaacuauucuccuag

SEQ ID NO: 1377437 - RNA, 19 nt, Human
uaccauagaaagagaaaac

SEQ ID NO: 1377438 - RNA, 18 nt, Human
uagaaagagaaaacggug

SEQ ID NO: 1377439 - RNA, 25 nt, Human
uagcacuuugggaggccaaggcagg

SEQ ID NO: 1377440 - RNA, 23 nt, Human
uaguagagaagggguuucaccau

SEQ ID NO: 1377441 - RNA, 24 nt, Human
uaguagagaagggguuucaccaua

SEQ ID NO: 1377442 - RNA, 19 nt, Human
uauaaaacuugcagaccua

SEQ ID NO: 1377443 - RNA, 24 nt, Human
uauaaagcaagaauuucaaggcac

SEQ ID NO: 1377444 - RNA, 22 nt, Human
ucaacaccugaagaaugaauga

SEQ ID NO: 1377445 - RNA, 23 nt, Human
ucacgccacggcacuccagccug

SEQ ID NO: 1377446 - RNA, 19 nt, Human
ucacuugaggucaggaguu

SEQ ID NO: 1377447 - RNA, 24 nt, Human
uccaaauaacacuccuaaaucaac

SEQ ID NO: 1377448 - RNA, 23 nt, Human
uccacuguuaaggcagcaggugc

SEQ ID NO: 1377449 - RNA, 21 nt, Human
uccagaguaaaaauaaaaaac

SEQ ID NO: 1377450 - RNA, 23 nt, Human
ucccaaagugcugggauuacagg

SEQ ID NO: 1377451 - RNA, 21 nt, Human
ucccauauucaagcgauucuc

SEQ ID NO: 1377452 - RNA, 24 nt, Human
ucccauauucaagcgauucuccug

SEQ ID NO: 1377453 - RNA, 24 nt, Human
ucgcuugaacccgggagguggagg

SEQ ID NO: 1377454 - RNA, 24 nt, Human
ucgggaggcugaggcaggagaauc

SEQ ID NO: 1377455 - RNA, 18 nt, Human
ucguccugagcuuccugu

SEQ ID NO: 1377456 - RNA, 21 nt, Human
ucucuacuaaaaauacaaaaa

SEQ ID NO: 1377457 - RNA, 22 nt, Human
ucucucuuguugcccaggcugg

SEQ ID NO: 1377458 - RNA, 23 nt, Human
ucucucuuguugcccaggcugga

SEQ ID NO: 1377459 - RNA, 22 nt, Human
ucuuguugcccaggcuggagug

SEQ ID NO: 1377460 - RNA, 19 nt, Human
ugaaaccccaucucuacua

SEQ ID NO: 1377461 - RNA, 22 nt, Human
ugaaaugaaaauuacagaugua

SEQ ID NO: 1377462 - RNA, 23 nt, Human
ugagaccagccuggccaauaugg

SEQ ID NO: 1377463 - RNA, 24 nt, Human
ugagaccagccuggccaauauggu

SEQ ID NO: 1377464 - RNA, 22 nt, Human
ugagcugagaucacgccacggc

SEQ ID NO: 1377465 - RNA, 20 nt, Human
ugaggcaggagaaucgcuug

SEQ ID NO: 1377466 - RNA, 24 nt, Human
ugaggcaggagaaucgcuugaacc

SEQ ID NO: 1377467 - RNA, 25 nt, Human
ugaggcaggagaaucgcuugaaccc

SEQ ID NO: 1377468 - RNA, 18 nt, Human
ugaggucaggaguuugag

SEQ ID NO: 1377469 - RNA, 18 nt, Human
ugcaaggaaaauccagag

SEQ ID NO: 1377470 - RNA, 18 nt, Human
ugcccaggcuggagugca

SEQ ID NO: 1377471 - RNA, 21 nt, Human
ugcccaggcuggagugcaaug

SEQ ID NO: 1377472 - RNA, 24 nt, Human
ugcccaggcuggagugcaauggug

SEQ ID NO: 1377473 - RNA, 23 nt, Human
ugcccucaaauguacucucuucc

SEQ ID NO: 1377474 - RNA, 24 nt, Human
ugccucagcaucccaaguaucugg

SEQ ID NO: 1377475 - RNA, 23 nt, Human
ugccugcaaucccagcuacucgg

SEQ ID NO: 1377476 - RNA, 24 nt, Human
ugccugcaaucccagcuacucggg

SEQ ID NO: 1377477 - RNA, 24 nt, Human
ugcugggauuacaggugugagcca

SEQ ID NO: 1377478 - RNA, 20 nt, Human
uggagugcaauggugucauc

SEQ ID NO: 1377479 - RNA, 23 nt, Human
uggagugcaauggugucaucuug

SEQ ID NO: 1377480 - RNA, 24 nt, Human
uggagugcaauggugucaucuugg

SEQ ID NO: 1377481 - RNA, 24 nt, Human
uggaguuacaggcaugcaccacca

SEQ ID NO: 1377482 - RNA, 24 nt, Human
uggccaauauggugaaaccccauc

SEQ ID NO: 1377483 - RNA, 19 nt, Human
uggcucaugccuguaaacc

SEQ ID NO: 1377484 - RNA, 24 nt, Human
uggcucaugccuguaaaccuagca

SEQ ID NO: 1377485 - RNA, 24 nt, Human
ugggaggccaaggcaggcggauca

SEQ ID NO: 1377486 - RNA, 18 nt, Human
ugggauuacaggugugag

SEQ ID NO: 1377487 - RNA, 19 nt, Human
ugggauuacaggugugagc

SEQ ID NO: 1377488 - RNA, 21 nt, Human
ugggauuacaggugugagcca

SEQ ID NO: 1377489 - RNA, 22 nt, Human
ugggauuacaggugugagccac

SEQ ID NO: 1377490 - RNA, 22 nt, Human
ugggauuacaggugugagccac

SEQ ID NO: 1377491 - RNA, 24 nt, Human
ugggauuacaggugugagccacug

SEQ ID NO: 1377492 - RNA, 24 nt, Human
uggucaggcuggucucaaacuccu

SEQ ID NO: 1377493 - RNA, 22 nt, Human
ugguggcucaugccuguaaacc

SEQ ID NO: 1377494 - RNA, 22 nt, Human
uguugaggaccuccuucacgua

SEQ ID NO: 1377495 - RNA, 20 nt, Human
uguugcccaggcuggagugc

SEQ ID NO: 1377496 - RNA, 22 nt, Human
uguugcccaggcuggagugcaa

SEQ ID NO: 1377497 - RNA, 24 nt, Human
uuagcuggguguggugucaggugc

SEQ ID NO: 1377498 - RNA, 18 nt, Human
uuaguagagaagggguuu

SEQ ID NO: 1377499 - RNA, 22 nt, Human
uuaguagagaagggguuucacc

SEQ ID NO: 1377500 - RNA, 24 nt, Human
uuaguagagaagggguuucaccau

SEQ ID NO: 1377501 - RNA, 21 nt, Human
uucaagcgauucuccugccuc

SEQ ID NO: 1377502 - RNA, 23 nt, Human
uucaagcgauucuccugccucag

SEQ ID NO: 1377503 - RNA, 24 nt, Human
uucaagcgauucuccugccucagc

SEQ ID NO: 1377504 - RNA, 24 nt, Human
uucucucuuguugcccaggcugga

SEQ ID NO: 1377505 - RNA, 24 nt, Human
uugaacccgggagguggagguugc

SEQ ID NO: 1377506 - RNA, 18 nt, Human
uugcagugagcugagauc

SEQ ID NO: 1377507 - RNA, 20 nt, Human
uugcagugagcugagaucac

SEQ ID NO: 1377508 - RNA, 21 nt, Human
uugcagugagcugagaucacg

SEQ ID NO: 1377509 - RNA, 27 nt, Human
uugcccaggcuggagugcaaugguguc

SEQ ID NO: 1377510 - RNA, 24 nt, Human
uuucaccauauuggucaggcuggu

SEQ ID NO: 1377511 - RNA, 22 nt, Human
uuuuguauuuuuuuaguagaga

SEQ ID NO: 1377512 - RNA, 24 nt, Human
uuuuuaguagagaagggguuucac

SEQ ID NO: 1377513 - RNA, 25 nt, Human
uuuuuuuaguagagaagggguuuca

SEQ ID NO: 1377514 - RNA, 23 nt, Human
aaacugccgggaaaauauaacaa

SEQ ID NO: 1377515 - RNA, 24 nt, Human
aaaggcuuuaccauggccuacagg

SEQ ID NO: 1377516 - RNA, 23 nt, Human
aaaguccuauaccuucucuccuc

SEQ ID NO: 1377517 - RNA, 19 nt, Human
aacagagacaacuuucgga

SEQ ID NO: 1377518 - RNA, 19 nt, Human
aagugcugggauuacaggc

SEQ ID NO: 1377519 - RNA, 19 nt, Human
aagugcugggauuacaggc

SEQ ID NO: 1377520 - RNA, 23 nt, Human
aagugcugggauuacaggcguga

SEQ ID NO: 1377521 - RNA, 26 nt, Human
aagugcugggauuacaggcgugagcc

SEQ ID NO: 1377522 - RNA, 24 nt, Human
aaucaccagaagaguagaaaaagg

SEQ ID NO: 1377523 - RNA, 24 nt, Human
aauuuuuguauuuuaguagagacg

SEQ ID NO: 1377524 - RNA, 19 nt, Human
acaggcaccugccaccacg

SEQ ID NO: 1377525 - RNA, 18 nt, Human
acgagguuucaccauguu

SEQ ID NO: 1377526 - RNA, 20 nt, Human
acgagguuucaccauguugg

SEQ ID NO: 1377527 - RNA, 24 nt, Human
acgagguuucaccauguuggccag

SEQ ID NO: 1377528 - RNA, 21 nt, Human
acucacucugucacccaagcu

SEQ ID NO: 1377529 - RNA, 24 nt, Human
acucacucugucacccaagcugga

SEQ ID NO: 1377530 - RNA, 24 nt, Human
acucccuuggccucccgaagugcu

SEQ ID NO: 1377531 - RNA, 18 nt, Human
acucugucacccaagcug

SEQ ID NO: 1377532 - RNA, 30 nt, Human
acucugucacccaagcuggagagcaauggg

SEQ ID NO: 1377533 - RNA, 18 nt, Human
agcacagaacagagacaa

SEQ ID NO: 1377534 - RNA, 23 nt, Human
agccagaguaaccccauaaaaau

SEQ ID NO: 1377535 - RNA, 23 nt, Human
aggugauccacucccuuggccuc

SEQ ID NO: 1377536 - RNA, 24 nt, Human
aguagccacccccauccccaaguc

SEQ ID NO: 1377537 - RNA, 21 nt, Human
aguagcugggauuacaggcac

SEQ ID NO: 1377538 - RNA, 23 nt, Human
aguagcugggauuacaggcaccu

SEQ ID NO: 1377539 - RNA, 18 nt, Human
agugcugggauuacaggc

SEQ ID NO: 1377540 - RNA, 19 nt, Human
augccacacuacuccucag

SEQ ID NO: 1377541 - RNA, 24 nt, Human
auuuuaguagagacgagguuucac

SEQ ID NO: 1377542 - RNA, 20 nt, Human
caaccuccaccucccagguu

SEQ ID NO: 1377543 - RNA, 23 nt, Human
caaccuccaccucccagguucaa

SEQ ID NO: 1377544 - RNA, 22 nt, Human
caagcaauucuccugucucagc

SEQ ID NO: 1377545 - RNA, 22 nt, Human
cacaagucaaauagcacagaac

SEQ ID NO: 1377546 - RNA, 24 nt, Human
cacaagucaaauagcacagaacag

SEQ ID NO: 1377547 - RNA, 21 nt, Human
cacagagaugucaccuuaaac

SEQ ID NO: 1377548 - RNA, 21 nt, Human
caccacaaccuccaccuccca

SEQ ID NO: 1377549 - RNA, 21 nt, Human
caccacaaccuccaccuccca

SEQ ID NO: 1377550 - RNA, 24 nt, Human
caccacgcccggcuaauuuuugua

SEQ ID NO: 1377551 - RNA, 18 nt, Human
caccauguuggccaggcu

SEQ ID NO: 1377552 - RNA, 24 nt, Human
caccauguuggccaggcuugucuc

SEQ ID NO: 1377553 - RNA, 22 nt, Human
cacccaagcuggagagcaaugg

SEQ ID NO: 1377554 - RNA, 18 nt, Human
cacccccauccccaaguc

SEQ ID NO: 1377555 - RNA, 19 nt, Human
cacccccauccccaaguca

SEQ ID NO: 1377556 - RNA, 20 nt, Human
cacccccauccccaagucaa

SEQ ID NO: 1377557 - RNA, 24 nt, Human
cacuagcccauucuacaucugcac

SEQ ID NO: 1377558 - RNA, 23 nt, Human
cacucugucacccaagcuggaga

SEQ ID NO: 1377559 - RNA, 25 nt, Human
cacucugucacccaagcuggagagc

SEQ ID NO: 1377560 - RNA, 20 nt, Human
cagccuccugaguagcuggg

SEQ ID NO: 1377561 - RNA, 21 nt, Human
caggcaccugccaccacgccc

SEQ ID NO: 1377562 - RNA, 18 nt, Human
cauucuacaucugcacaa

SEQ ID NO: 1377563 - RNA, 24 nt, Human
ccacaaccuccaccucccagguuc

SEQ ID NO: 1377564 - RNA, 20 nt, Human
ccaccacgcccggcuaauuu

SEQ ID NO: 1377565 - RNA, 19 nt, Human
ccaccaugcccagccaaca

SEQ ID NO: 1377566 - RNA, 27 nt, Human
ccaccucccagguucaagcaauucuuu

SEQ ID NO: 1377567 - RNA, 19 nt, Human
ccagaagaguagaaaaagg

SEQ ID NO: 1377568 - RNA, 18 nt, Human
cccacucuuucucuucac

SEQ ID NO: 1377569 - RNA, 23 nt, Human
cccacuguggacauggugggggc

SEQ ID NO: 1377570 - RNA, 23 nt, Human
cccagguucaagcaauucuccug

SEQ ID NO: 1377571 - RNA, 24 nt, Human
cccgaagugcugggauuacaggcg

SEQ ID NO: 1377572 - RNA, 24 nt, Human
ccgaagugcugggauuacaggcgu

SEQ ID NO: 1377573 - RNA, 24 nt, Human
ccucccagguucaagcaauucucc

SEQ ID NO: 1377574 - RNA, 20 nt, Human
ccugaccucaggugauccac

SEQ ID NO: 1377575 - RNA, 20 nt, Human
ccugaccucaggugauccac

SEQ ID NO: 1377576 - RNA, 24 nt, Human
ccugaccucaggugauccacuccc

SEQ ID NO: 1377577 - RNA, 23 nt, Human
ccugaguagcugggauuacaggc

SEQ ID NO: 1377578 - RNA, 24 nt, Human
ccugaguagcugggauuacaggca

SEQ ID NO: 1377579 - RNA, 24 nt, Human
ccugucucagccuccugaguagcu

SEQ ID NO: 1377580 - RNA, 24 nt, Human
cgaagugcugggauuacaggcgug

SEQ ID NO: 1377581 - RNA, 24 nt, Human
cgagguuucaccauguuggccagg

SEQ ID NO: 1377582 - RNA, 22 nt, Human
cuaaugccacacuacuccucag

SEQ ID NO: 1377583 - RNA, 24 nt, Human
cucaccacaaccuccaccucccag

SEQ ID NO: 1377584 - RNA, 23 nt, Human
cucacucugucacccaagcugga

SEQ ID NO: 1377585 - RNA, 24 nt, Human
cucacucugucacccaagcuggag

SEQ ID NO: 1377586 - RNA, 23 nt, Human
cucagccuccugaguagcuggga

SEQ ID NO: 1377587 - RNA, 21 nt, Human
cucucagaccccaucuaaugc

SEQ ID NO: 1377588 - RNA, 23 nt, Human
cugaguagcugggauuacaggca

SEQ ID NO: 1377589 - RNA, 19 nt, Human
cuuuauuugaagauguugg

SEQ ID NO: 1377590 - RNA, 18 nt, Human
gaagaguagaaaaaggcu

SEQ ID NO: 1377591 - RNA, 24 nt, Human
gaagugcugggauuacaggcguga

SEQ ID NO: 1377592 - RNA, 23 nt, Human
gaccucaggugauccacucccuu

SEQ ID NO: 1377593 - RNA, 23 nt, Human
gagguuucaccauguuggccagg

SEQ ID NO: 1377594 - RNA, 18 nt, Human
gauuacaggcgugagcca

SEQ ID NO: 1377595 - RNA, 21 nt, Human
gauuacaggcgugagccacca

SEQ ID NO: 1377596 - RNA, 24 nt, Human
gauuacaggcgugagccaccaugc

SEQ ID NO: 1377597 - RNA, 22 nt, Human
gcccggcuaauuuuuguauuuu

SEQ ID NO: 1377598 - RNA, 24 nt, Human
ggauuacaggcgugagccaccaug

SEQ ID NO: 1377599 - RNA, 20 nt, Human
ggcaaauauaugguccaagg

SEQ ID NO: 1377600 - RNA, 23 nt, Human
ggugauccacucccuuggccucc

SEQ ID NO: 1377601 - RNA, 18 nt, Human
guagcugggauuacaggc

SEQ ID NO: 1377602 - RNA, 23 nt, Human
gugauccacucccuuggccuccc

SEQ ID NO: 1377603 - RNA, 19 nt, Human
uaaaugcccuucuuugcuc

SEQ ID NO: 1377604 - RNA, 22 nt, Human
uaacugggccaugauggcugaa

SEQ ID NO: 1377605 - RNA, 20 nt, Human
uaacuucugacuuguuccuu

SEQ ID NO: 1377606 - RNA, 24 nt, Human
uaaucaagccauuuggugaaaauc

SEQ ID NO: 1377607 - RNA, 23 nt, Human
uaauuuuuguauuuuaguagaga

SEQ ID NO: 1377608 - RNA, 23 nt, Human
uacaggcaccugccaccacgccc

SEQ ID NO: 1377609 - RNA, 24 nt, Human
uacaggcgugagccaccaugccca

SEQ ID NO: 1377610 - RNA, 20 nt, Human
uaccuacucccaagcucaaa

SEQ ID NO: 1377611 - RNA, 19 nt, Human
uagaaaaaggcuuuaccau

SEQ ID NO: 1377612 - RNA, 22 nt, Human
uagagacgagguuucaccaugu

SEQ ID NO: 1377613 - RNA, 23 nt, Human
uagcaaaaagguucagaagaaaa

SEQ ID NO: 1377614 - RNA, 24 nt, Human
uaguagagacgagguuucaccaug

SEQ ID NO: 1377615 - RNA, 26 nt, Human
uaguagagacgagguuucaccauguu

SEQ ID NO: 1377616 - RNA, 20 nt, Human
uaugcuccccuucuucacug

SEQ ID NO: 1377617 - RNA, 19 nt, Human
uauuuugcuaccuacuccc

SEQ ID NO: 1377618 - RNA, 24 nt, Human
ucaccacaaccuccaccucccagg

SEQ ID NO: 1377619 - RNA, 27 nt, Human
ucaccacaaccuccaccucccagguuc

SEQ ID NO: 1377620 - RNA, 20 nt, Human
ucagccuccugaguagcugg

SEQ ID NO: 1377621 - RNA, 26 nt, Human
ucagcucaccacaaccuccaccuccc

SEQ ID NO: 1377622 - RNA, 18 nt, Human
ucaggguccuauacaaag

SEQ ID NO: 1377623 - RNA, 18 nt, Human
uccaacuccugaccucag

SEQ ID NO: 1377624 - RNA, 21 nt, Human
uccacaguuaccuucugacca

SEQ ID NO: 1377625 - RNA, 21 nt, Human
ucccagguucaagcaauucuc

SEQ ID NO: 1377626 - RNA, 24 nt, Human
ucccagguucaagcaauucuccug

SEQ ID NO: 1377627 - RNA, 19 nt, Human
ucccgaagugcugggauua

SEQ ID NO: 1377628 - RNA, 24 nt, Human
ucccgaagugcugggauuacaggc

SEQ ID NO: 1377629 - RNA, 23 nt, Human
ucccuuggccucccgaagugcug

SEQ ID NO: 1377630 - RNA, 24 nt, Human
uccugaguagcugggauuacaggc

SEQ ID NO: 1377631 - RNA, 24 nt, Human
uccuggcaaauauaugguccaagg

SEQ ID NO: 1377632 - RNA, 24 nt, Human
uccuguguaacucucagaccccau

SEQ ID NO: 1377633 - RNA, 22 nt, Human
ucuaaugccacacuacuccuca

SEQ ID NO: 1377634 - RNA, 28 nt, Human
ucucacucacucugucacccaagcugga

SEQ ID NO: 1377635 - RNA, 22 nt, Human
ucuccucaaaccuuuuucuccc

SEQ ID NO: 1377636 - RNA, 24 nt, Human
ucuccugucucagccuccugagua

SEQ ID NO: 1377637 - RNA, 19 nt, Human
ugaccucaggugauccacu

SEQ ID NO: 1377638 - RNA, 20 nt, Human
ugaccucaggugauccacuc

SEQ ID NO: 1377639 - RNA, 22 nt, Human
ugaccucaggugauccacuccc

SEQ ID NO: 1377640 - RNA, 26 nt, Human
ugagauggagucucacucacucuguc

SEQ ID NO: 1377641 - RNA, 18 nt, Human
ugcaaggaauuccauuga

SEQ ID NO: 1377642 - RNA, 20 nt, Human
ugcacagagaugucaccuua

SEQ ID NO: 1377643 - RNA, 24 nt, Human
ugcugggauuacaggcgugagcca

SEQ ID NO: 1377644 - RNA, 24 nt, Human
uggccaggcuugucuccaacuccu

SEQ ID NO: 1377645 - RNA, 20 nt, Human
uggcccagaagagaaugcaa

SEQ ID NO: 1377646 - RNA, 25 nt, Human
uggccuacaggcuccacauguuccu

SEQ ID NO: 1377647 - RNA, 24 nt, Human
uggcgcgaucucagcucaccacaa

SEQ ID NO: 1377648 - RNA, 21 nt, Human
ugggauuacaggcaccugcca

SEQ ID NO: 1377649 - RNA, 22 nt, Human
ugggauuacaggcaccugccac

SEQ ID NO: 1377650 - RNA, 24 nt, Human
ugggauuacaggcaccugccacca

SEQ ID NO: 1377651 - RNA, 18 nt, Human
ugggauuacaggcgugag

SEQ ID NO: 1377652 - RNA, 22 nt, Human
ugggauuacaggcgugagccac

SEQ ID NO: 1377653 - RNA, 23 nt, Human
ugggauuacaggcgugagccacc

SEQ ID NO: 1377654 - RNA, 24 nt, Human
ugggauuacaggcgugagccacca

SEQ ID NO: 1377655 - RNA, 25 nt, Human
ugggauuacaggcgugagccaccau

SEQ ID NO: 1377656 - RNA, 24 nt, Human
ugucucagccuccugaguagcugg

SEQ ID NO: 1377657 - RNA, 24 nt, Human
uuaguagagacgagguuucaccau

SEQ ID NO: 1377658 - RNA, 24 nt, Human
uucagaagaaaacugccgggaaaa

SEQ ID NO: 1377659 - RNA, 23 nt, Human
uucaugucuuuuucuccucucaa

SEQ ID NO: 1377660 - RNA, 20 nt, Human
uucccaaguggccucccaga

SEQ ID NO: 1377661 - RNA, 22 nt, Human
uuccucaaagaugugugucagg

SEQ ID NO: 1377662 - RNA, 24 nt, Human
uuccucauaaccacuucuuuauuu

SEQ ID NO: 1377663 - RNA, 24 nt, Human
uucugaucauuccucauaaccacu

SEQ ID NO: 1377664 - RNA, 22 nt, Human
uugaagauguuggagaacuuac

SEQ ID NO: 1377665 - RNA, 21 nt, Human
uuguaguugagagccugugug

SEQ ID NO: 1377666 - RNA, 24 nt, Human
uuucaccauguuggccaggcuugu

SEQ ID NO: 1377667 - RNA, 18 nt, Human
uuucggagcccacugugg

SEQ ID NO: 1377668 - RNA, 19 nt, Human
uuuuuguauuuuaguagag

SEQ ID NO: 1377669 - RNA, 26 nt, Human
uuuuuuuuuuuugagauggagucuca

SEQ ID NO: 1377670 - RNA, 18 nt, Human
aaaaaaaaaaaaaaugaa

SEQ ID NO: 1377671 - RNA, 22 nt, Human
aaaaaaaaaaaaaaugaaguag

SEQ ID NO: 1377672 - RNA, 22 nt, Human
aaaaggacaagacgcugucaaa

SEQ ID NO: 1377673 - RNA, 20 nt, Human
aaacaaaaaauuuagaagau

SEQ ID NO: 1377674 - RNA, 22 nt, Human
aaacaaaagaagguaaaauuag

SEQ ID NO: 1377675 - RNA, 19 nt, Human
aaagcuccuccaaacacau

SEQ ID NO: 1377676 - RNA, 24 nt, Human
aaagugcugggauuacaggcauga

SEQ ID NO: 1377677 - RNA, 24 nt, Human
aacaaaaaauuuagaagauuuuaa

SEQ ID NO: 1377678 - RNA, 23 nt, Human
aacaaauuucaugaugcuagacu

SEQ ID NO: 1377679 - RNA, 19 nt, Human
aagugcugggauuacaggc

SEQ ID NO: 1377680 - RNA, 21 nt, Human
aagugcugggauuacaggcau

SEQ ID NO: 1377681 - RNA, 26 nt, Human
aagugcugggauuacaggcaugagcc

SEQ ID NO: 1377682 - RNA, 18 nt, Human
acgggguuucaccauguu

SEQ ID NO: 1377683 - RNA, 19 nt, Human
acgggguuucaccauguua

SEQ ID NO: 1377684 - RNA, 20 nt, Human
acgggguuucaccauguuag

SEQ ID NO: 1377685 - RNA, 24 nt, Human
acgggguuucaccauguuagccag

SEQ ID NO: 1377686 - RNA, 18 nt, Human
acuggacuccagccuggg

SEQ ID NO: 1377687 - RNA, 18 nt, Human
aggauggggagggaggag

SEQ ID NO: 1377688 - RNA, 20 nt, Human
aggcaggagaauuuuuaacc

SEQ ID NO: 1377689 - RNA, 21 nt, Human
aggcaggagaauuuuuaaccu

SEQ ID NO: 1377690 - RNA, 22 nt, Human
aggcaggagaauuuuuaaccug

SEQ ID NO: 1377691 - RNA, 23 nt, Human
aggcaggagaauuuuuaaccugg

SEQ ID NO: 1377692 - RNA, 18 nt, Human
aggcaugagccaccaagc

SEQ ID NO: 1377693 - RNA, 21 nt, Human
aggcaugagccaccaagccug

SEQ ID NO: 1377694 - RNA, 19 nt, Human
aggcugaggcaggagaauu

SEQ ID NO: 1377695 - RNA, 21 nt, Human
aggugaacauuagaaacaacu

SEQ ID NO: 1377696 - RNA, 18 nt, Human
agugcugggauuacaggc

SEQ ID NO: 1377697 - RNA, 18 nt, Human
aguggcugcgcaugccug

SEQ ID NO: 1377698 - RNA, 22 nt, Human
auaaaucacauauuaugaauaa

SEQ ID NO: 1377699 - RNA, 24 nt, Human
augaugcuagacuaggauggggag

SEQ ID NO: 1377700 - RNA, 19 nt, Human
auggggagggaggagagga

SEQ ID NO: 1377701 - RNA, 21 nt, Human
auggggguaaaagcuccucca

SEQ ID NO: 1377702 - RNA, 24 nt, Human
auugcaccacuggacuccagccug

SEQ ID NO: 1377703 - RNA, 20 nt, Human
caaaaaaaaaaaaaaugaag

SEQ ID NO: 1377704 - RNA, 24 nt, Human
caaagugcugggauuacaggcaug

SEQ ID NO: 1377705 - RNA, 18 nt, Human
caccauguuagccaggau

SEQ ID NO: 1377706 - RNA, 22 nt, Human
caccauguuagccaggaugguc

SEQ ID NO: 1377707 - RNA, 24 nt, Human
caccauguuagccaggauggucuc

SEQ ID NO: 1377708 - RNA, 19 nt, Human
cacuggacuccagccuggg

SEQ ID NO: 1377709 - RNA, 19 nt, Human
cacugucuaaaagucuucc

SEQ ID NO: 1377710 - RNA, 22 nt, Human
cagaaacagcauuaaaaugaga

SEQ ID NO: 1377711 - RNA, 21 nt, Human
cagcauuaaaaugagaccaaa

SEQ ID NO: 1377712 - RNA, 24 nt, Human
cagcuacucaggaggcugaggcag

SEQ ID NO: 1377713 - RNA, 19 nt, Human
caguaugaauucucugaug

SEQ ID NO: 1377714 - RNA, 20 nt, Human
caguaugaauucuuugaugu

SEQ ID NO: 1377715 - RNA, 22 nt, Human
cauuagaaacaacuucaauguc

SEQ ID NO: 1377716 - RNA, 23 nt, Human
ccaaagugcugggauuacaggca

SEQ ID NO: 1377717 - RNA, 24 nt, Human
ccaaagugcugggauuacaggcau

SEQ ID NO: 1377718 - RNA, 20 nt, Human
ccacuggacuccagccuggg

SEQ ID NO: 1377719 - RNA, 20 nt, Human
ccacuggacuccagccuggg

SEQ ID NO: 1377720 - RNA, 21 nt, Human
ccacuggacuccagccugggu

SEQ ID NO: 1377721 - RNA, 24 nt, Human
cccaaagugcugggauuacaggca

SEQ ID NO: 1377722 - RNA, 18 nt, Human
cccacuguugggaaucug

SEQ ID NO: 1377723 - RNA, 21 nt, Human
ccuguagucccagcuacucag

SEQ ID NO: 1377724 - RNA, 24 nt, Human
cgccucggccucccaaagugcugg

SEQ ID NO: 1377725 - RNA, 24 nt, Human
cgggguuucaccauguuagccagg

SEQ ID NO: 1377726 - RNA, 22 nt, Human
cuaaaggccuucccacauuccu

SEQ ID NO: 1377727 - RNA, 19 nt, Human
cuccuccaaacacaugcaa

SEQ ID NO: 1377728 - RNA, 24 nt, Human
cuccugaccucgugauccgcccgc

SEQ ID NO: 1377729 - RNA, 24 nt, Human
cugcacaauagaaacaaaagaagg

SEQ ID NO: 1377730 - RNA, 21 nt, Human
cuugaaugauagcuaaaggcc

SEQ ID NO: 1377731 - RNA, 20 nt, Human
cuuuccagaaugaauucucu

SEQ ID NO: 1377732 - RNA, 22 nt, Human
gaccucgugauccgcccgccuc

SEQ ID NO: 1377733 - RNA, 22 nt, Human
gaccucgugauccgcccgccuc

SEQ ID NO: 1377734 - RNA, 24 nt, Human
gaccucgugauccgcccgccucgg

SEQ ID NO: 1377735 - RNA, 24 nt, Human
gagacgggguuucaccauguuagc

SEQ ID NO: 1377736 - RNA, 18 nt, Human
gagggaggagaggaaacc

SEQ ID NO: 1377737 - RNA, 18 nt, Human
gagguugcagugagccaa

SEQ ID NO: 1377738 - RNA, 21 nt, Human
gagguugcagugagccaagau

SEQ ID NO: 1377739 - RNA, 23 nt, Human
gagguugcagugagccaagauug

SEQ ID NO: 1377740 - RNA, 18 nt, Human
gauagcuaaaggccuucc

SEQ ID NO: 1377741 - RNA, 18 nt, Human
gauuacaggcaugagcca

SEQ ID NO: 1377742 - RNA, 21 nt, Human
gauuacaggcaugagccacca

SEQ ID NO: 1377743 - RNA, 24 nt, Human
gauuacaggcaugagccaccaagc

SEQ ID NO: 1377744 - RNA, 20 nt, Human
gccagauacucuuuaauccc

SEQ ID NO: 1377745 - RNA, 22 nt, Human
ggagguugcagugagccaagau

SEQ ID NO: 1377746 - RNA, 24 nt, Human
ggagguugcagugagccaagauug

SEQ ID NO: 1377747 - RNA, 24 nt, Human
ggauggucucgaucuccugaccuc

SEQ ID NO: 1377748 - RNA, 19 nt, Human
ggauuacaggcaugagcca

SEQ ID NO: 1377749 - RNA, 19 nt, Human
ggcggagguugcagugagc

SEQ ID NO: 1377750 - RNA, 23 nt, Human
ggcggagguugcagugagccaag

SEQ ID NO: 1377751 - RNA, 23 nt, Human
gggguuucaccauguuagccagg

SEQ ID NO: 1377752 - RNA, 23 nt, Human
ggguggcggagguugcagugagc

SEQ ID NO: 1377753 - RNA, 24 nt, Human
gguuucaccauguuagccaggaug

SEQ ID NO: 1377754 - RNA, 25 nt, Human
guaaaagcuccuccaaacacaugca

SEQ ID NO: 1377755 - RNA, 26 nt, Human
guaaaagcuccuccaaacacaugcaa

SEQ ID NO: 1377756 - RNA, 24 nt, Human
guaauaaaucacauauuaugaaua

SEQ ID NO: 1377757 - RNA, 23 nt, Human
guagagacgggguuucaccaugu

SEQ ID NO: 1377758 - RNA, 24 nt, Human
gugauccgcccgccucggccuccc

SEQ ID NO: 1377759 - RNA, 19 nt, Human
uaaaacaaagacaauguau

SEQ ID NO: 1377760 - RNA, 18 nt, Human
uaaaaggaaacugauagc

SEQ ID NO: 1377761 - RNA, 23 nt, Human
uaaaaugagaccaaaauuuacac

SEQ ID NO: 1377762 - RNA, 24 nt, Human
uaaaaugagaccaaaauuuacacu

SEQ ID NO: 1377763 - RNA, 22 nt, Human
uaaauaaauacuaaugaaacug

SEQ ID NO: 1377764 - RNA, 22 nt, Human
uaacucagaaacagcauuaaaa

SEQ ID NO: 1377765 - RNA, 20 nt, Human
uacaggcaugagccaccaag

SEQ ID NO: 1377766 - RNA, 22 nt, Human
uacaggcaugagccaccaagcc

SEQ ID NO: 1377767 - RNA, 22 nt, Human
uagagacgggguuucaccaugu

SEQ ID NO: 1377768 - RNA, 23 nt, Human
uaguagagacgggguuucaccau

SEQ ID NO: 1377769 - RNA, 24 nt, Human
uaguagagacgggguuucaccaug

SEQ ID NO: 1377770 - RNA, 26 nt, Human
uaguagagacgggguuucaccauguu

SEQ ID NO: 1377771 - RNA, 27 nt, Human
uaguggcugcgcaugccuguaguccca

SEQ ID NO: 1377772 - RNA, 24 nt, Human
uauuucacugguuucagugaaaca

SEQ ID NO: 1377773 - RNA, 23 nt, Human
uauuucacuguuucagugaaaua

SEQ ID NO: 1377774 - RNA, 24 nt, Human
ucaccauguuagccaggauggucu

SEQ ID NO: 1377775 - RNA, 18 nt, Human
ucagaaacagcauuaaaa

SEQ ID NO: 1377776 - RNA, 21 nt, Human
uccaaacacaugcaaaaaaug

SEQ ID NO: 1377777 - RNA, 24 nt, Human
uccaucaacaaauuucaugaugcu

SEQ ID NO: 1377778 - RNA, 25 nt, Human
uccaucaacaaauuucaugaugcua

SEQ ID NO: 1377779 - RNA, 24 nt, Human
ucccaaagugcugggauuacaggc

SEQ ID NO: 1377780 - RNA, 19 nt, Human
ucccacuguugggaaucug

SEQ ID NO: 1377781 - RNA, 18 nt, Human
ucggccucccaaagugcu

SEQ ID NO: 1377782 - RNA, 22 nt, Human
ucuaaaagucuucccacauucc

SEQ ID NO: 1377783 - RNA, 18 nt, Human
ucucaaaaaaaaaaaaaa

SEQ ID NO: 1377784 - RNA, 23 nt, Human
ucuuuugaggugugaacacuguc

SEQ ID NO: 1377785 - RNA, 22 nt, Human
ugaggcaggagaauuuuuaacc

SEQ ID NO: 1377786 - RNA, 22 nt, Human
ugaggcaggagaauuuuuaacc

SEQ ID NO: 1377787 - RNA, 24 nt, Human
ugaggcaggagaauuuuuaaccug

SEQ ID NO: 1377788 - RNA, 25 nt, Human
ugaggcaggagaauuuuuaaccugg

SEQ ID NO: 1377789 - RNA, 22 nt, Human
ugcacaauagaaacaaaagaag

SEQ ID NO: 1377790 - RNA, 24 nt, Human
ugccuguagucccagcuacucagg

SEQ ID NO: 1377791 - RNA, 24 nt, Human
uggcggagguugcagugagccaag

SEQ ID NO: 1377792 - RNA, 21 nt, Human
uggcuacagaacuggauguua

SEQ ID NO: 1377793 - RNA, 24 nt, Human
uggcugcgcaugccuguaguccca

SEQ ID NO: 1377794 - RNA, 18 nt, Human
ugggauuacaggcaugag

SEQ ID NO: 1377795 - RNA, 19 nt, Human
ugggauuacaggcaugagc

SEQ ID NO: 1377796 - RNA, 22 nt, Human
ugggauuacaggcaugagccac

SEQ ID NO: 1377797 - RNA, 23 nt, Human
ugggauuacaggcaugagccacc

SEQ ID NO: 1377798 - RNA, 24 nt, Human
ugggauuacaggcaugagccacca

SEQ ID NO: 1377799 - RNA, 25 nt, Human
ugggugugucucaaaaaaaaaaaaa

SEQ ID NO: 1377800 - RNA, 26 nt, Human
ugggugugucucaaaaaaaaaaaaaa

SEQ ID NO: 1377801 - RNA, 20 nt, Human
ugucuaaaagucuucccaca

SEQ ID NO: 1377802 - RNA, 28 nt, Human
uucagugaaauauuucacugguuucagu

SEQ ID NO: 1377803 - RNA, 20 nt, Human
uucauuuuauuucacuguuu

SEQ ID NO: 1377804 - RNA, 23 nt, Human
uugcaccacuggacuccagccug

SEQ ID NO: 1377805 - RNA, 22 nt, Human
uugcagugagccaagauugcac

SEQ ID NO: 1377806 - RNA, 18 nt, Human
uuuaugaaauuuacauga

SEQ ID NO: 1377807 - RNA, 19 nt, Human
uuucaccauguuagccagg

SEQ ID NO: 1377808 - RNA, 20 nt, Human
uuucaccauguuagccagga

SEQ ID NO: 1377809 - RNA, 18 nt, Human
uuuccaucaacaaauuuc

SEQ ID NO: 1377810 - RNA, 18 nt, Human
auccacaguaaacaggau

SEQ ID NO: 1377811 - RNA, 23 nt, Human
cagacccaacccucagggggguu

SEQ ID NO: 1377812 - RNA, 23 nt, Human
caggauuaucauucccauaauau

SEQ ID NO: 1377813 - RNA, 21 nt, Human
cagugccuucucagaggcccc

SEQ ID NO: 1377814 - RNA, 19 nt, Human
cagugugaauucucugaug

SEQ ID NO: 1377815 - RNA, 24 nt, Human
ccaacccucagggggguuuucuca

SEQ ID NO: 1377816 - RNA, 19 nt, Human
ccagugugaauucucugau

SEQ ID NO: 1377817 - RNA, 22 nt, Human
cccacacucaguacauauggaa

SEQ ID NO: 1377818 - RNA, 18 nt, Human
gccaugugugacauucug

SEQ ID NO: 1377819 - RNA, 20 nt, Human
uaacaguauucuauuguagu

SEQ ID NO: 1377820 - RNA, 21 nt, Human
ucacugcauucauaagguuuc

SEQ ID NO: 1377821 - RNA, 25 nt, Human
ucagacccaacccucagggggguuu

SEQ ID NO: 1377822 - RNA, 22 nt, Human
ucagaggcccucuccagaacag

SEQ ID NO: 1377823 - RNA, 24 nt, Human
ucagugccuucucagaggcccucu

SEQ ID NO: 1377824 - RNA, 18 nt, Human
ucuacuuugaaucuucuc

SEQ ID NO: 1377825 - RNA, 19 nt, Human
ugacucgguuccuugucag

SEQ ID NO: 1377826 - RNA, 23 nt, Human
ugaucuuucuuaugaagaauuug

SEQ ID NO: 1377827 - RNA, 19 nt, Human
uucauaagguuucucucca

SEQ ID NO: 1377828 - RNA, 23 nt, Human
uucccacacucaguacauaugga

SEQ ID NO: 1377829 - RNA, 26 nt, Human
uucucauguguaaugagguuggaauu

SEQ ID NO: 1377830 - RNA, 24 nt, Human
uucucugaugcacugugagugcug

SEQ ID NO: 1377831 - RNA, 19 nt, Human
uuuucugcugcaugcgugc

SEQ ID NO: 1377832 - RNA, 22 nt, Human
aaaaaaggaaaaaguggaaaag

SEQ ID NO: 1377833 - RNA, 24 nt, Human
aaaaaaggaaaaaguggaaaagaa

SEQ ID NO: 1377834 - RNA, 24 nt, Human
aaaaaauaaacacaauaaacaccc

SEQ ID NO: 1377835 - RNA, 22 nt, Human
aaaaacaacucaaaaacccucc

SEQ ID NO: 1377836 - RNA, 23 nt, Human
aaaaacacaguugauugacaauc

SEQ ID NO: 1377837 - RNA, 23 nt, Human
aaaaaggaaaaaguggaaaagaa

SEQ ID NO: 1377838 - RNA, 19 nt, Human
aaacaccccuggcaucuuu

SEQ ID NO: 1377839 - RNA, 23 nt, Human
aaacaguuuuuaucuuuguucau

SEQ ID NO: 1377840 - RNA, 18 nt, Human
aacauccccacgaugaca

SEQ ID NO: 1377841 - RNA, 18 nt, Human
aaccccacugacaacgcc

SEQ ID NO: 1377842 - RNA, 19 nt, Human
aacucaaaaacccuccaaa

SEQ ID NO: 1377843 - RNA, 21 nt, Human
aacucaaaaacccuccaaaca

SEQ ID NO: 1377844 - RNA, 22 nt, Human
aacucaaaaacccuccaaacag

SEQ ID NO: 1377845 - RNA, 23 nt, Human
aaggaaaaaguggaaaagaaaau

SEQ ID NO: 1377846 - RNA, 27 nt, Human
aaggaaaaaguggaaaagaagggaccc

SEQ ID NO: 1377847 - RNA, 22 nt, Human
aaggaaggcaucugggcagggc

SEQ ID NO: 1377848 - RNA, 19 nt, Human
aaggggcuuauuucacugg

SEQ ID NO: 1377849 - RNA, 28 nt, Human
accccacccaacaacauaagaaaaacaa

SEQ ID NO: 1377850 - RNA, 18 nt, Human
agaaggcucugagggcuc

SEQ ID NO: 1377851 - RNA, 22 nt, Human
agaccaagcccaccagguuggc

SEQ ID NO: 1377852 - RNA, 25 nt, Human
agaugaucaaguaaagauuuaaaac

SEQ ID NO: 1377853 - RNA, 21 nt, Human
aggaaggcaucugggcagggc

SEQ ID NO: 1377854 - RNA, 21 nt, Human
aggcaucuuccuccugcagcc

SEQ ID NO: 1377855 - RNA, 23 nt, Human
auaaauaaauaucuucuucuuuc

SEQ ID NO: 1377856 - RNA, 21 nt, Human
auaccccacccaacaacauaa

SEQ ID NO: 1377857 - RNA, 23 nt, Human
caaaacccgccacuaucaacaaa

SEQ ID NO: 1377858 - RNA, 20 nt, Human
caacauaagaaaaacaacuc

SEQ ID NO: 1377859 - RNA, 23 nt, Human
cacagagagagagaaaaaaggaa

SEQ ID NO: 1377860 - RNA, 24 nt, Human
cacagagagagagaaaaaaggaaa

SEQ ID NO: 1377861 - RNA, 22 nt, Human
caggcaucuuccuccugcagcc

SEQ ID NO: 1377862 - RNA, 18 nt, Human
caguuuccaguacaagga

SEQ ID NO: 1377863 - RNA, 23 nt, Human
caucccuuguuaagaaaugacuc

SEQ ID NO: 1377864 - RNA, 23 nt, Human
cauggacccugggaccgucccuu

SEQ ID NO: 1377865 - RNA, 24 nt, Human
ccaccagguuggcucugauuacac

SEQ ID NO: 1377866 - RNA, 22 nt, Human
cccacccaacaacauaagaaaa

SEQ ID NO: 1377867 - RNA, 31 nt, Human
ccccacccaacaacauaagaaaaacaacucc

SEQ ID NO: 1377868 - RNA, 18 nt, Human
ccccucacagggccacac

SEQ ID NO: 1377869 - RNA, 22 nt, Human
ccccugcggagagcaugagggc

SEQ ID NO: 1377870 - RNA, 20 nt, Human
ccgcagccaauggagcacac

SEQ ID NO: 1377871 - RNA, 23 nt, Human
ccugcagccgcagccaauggagc

SEQ ID NO: 1377872 - RNA, 19 nt, Human
cuaucaacaaagcuggagg

SEQ ID NO: 1377873 - RNA, 25 nt, Human
cucaaaaacccuccaaacaguuuuu

SEQ ID NO: 1377874 - RNA, 21 nt, Human
cucuuagcagguccuauuuuu

SEQ ID NO: 1377875 - RNA, 18 nt, Human
cugcuugauucucagaaa

SEQ ID NO: 1377876 - RNA, 18 nt, Human
cuuugugagcgccccccu

SEQ ID NO: 1377877 - RNA, 19 nt, Human
gaaaaaguggaaaagaaaa

SEQ ID NO: 1377878 - RNA, 22 nt, Human
gaggggucaggugguccaggug

SEQ ID NO: 1377879 - RNA, 23 nt, Human
gccaugaaaagccuuuuaaugac

SEQ ID NO: 1377880 - RNA, 18 nt, Human
gggcagggcccuuuggcu

SEQ ID NO: 1377881 - RNA, 18 nt, Human
gguccagguggggcucug

SEQ ID NO: 1377882 - RNA, 24 nt, Human
gucuacguugccacaugugucgcu

SEQ ID NO: 1377883 - RNA, 18 nt, Human
uaagaaaaacaacucaaa

SEQ ID NO: 1377884 - RNA, 24 nt, Human
uaaggacaguuccucuccuccccc

SEQ ID NO: 1377885 - RNA, 19 nt, Human
uacaaggaaggcaucuggg

SEQ ID NO: 1377886 - RNA, 19 nt, Human
uagaauggaaaaugucucu

SEQ ID NO: 1377887 - RNA, 26 nt, Human
uagcauggacccugggaccgucccuu

SEQ ID NO: 1377888 - RNA, 24 nt, Human
uauaaauaaauaucuucuucuuuc

SEQ ID NO: 1377889 - RNA, 27 nt, Human
uaucccaagaggcaucccuuguuaaga

SEQ ID NO: 1377890 - RNA, 20 nt, Human
ucaggugaucacgaaggggc

SEQ ID NO: 1377891 - RNA, 20 nt, Human
ucaggugguccagguggggc

SEQ ID NO: 1377892 - RNA, 18 nt, Human
uccccacgaugacagggg

SEQ ID NO: 1377893 - RNA, 21 nt, Human
uccccaugccccagacuuuau

SEQ ID NO: 1377894 - RNA, 24 nt, Human
uccccugaccuuuaaaaauccacc

SEQ ID NO: 1377895 - RNA, 19 nt, Human
uccucccccagaaggcucu

SEQ ID NO: 1377896 - RNA, 18 nt, Human
ucugcacuccccaugccc

SEQ ID NO: 1377897 - RNA, 21 nt, Human
ugacucauaaaauaaccuucc

SEQ ID NO: 1377898 - RNA, 26 nt, Human
ugccccagacuuuauuccccugaccu

SEQ ID NO: 1377899 - RNA, 20 nt, Human
ugccugugcaguucaguaac

SEQ ID NO: 1377900 - RNA, 21 nt, Human
uggaaaaugucucuuagcagg

SEQ ID NO: 1377901 - RNA, 20 nt, Human
uggcaucacagguauaaaua

SEQ ID NO: 1377902 - RNA, 22 nt, Human
uggcaucacagguauaaauaaa

SEQ ID NO: 1377903 - RNA, 23 nt, Human
uggugacaguugaaggcuguccu

SEQ ID NO: 1377904 - RNA, 22 nt, Human
uguacaaaacccgccacuauca

SEQ ID NO: 1377905 - RNA, 23 nt, Human
ugugcugcuacacaauuaugcug

SEQ ID NO: 1377906 - RNA, 18 nt, Human
uguggugacaguugaagg

SEQ ID NO: 1377907 - RNA, 20 nt, Human
uguggugacaguugaaggcu

SEQ ID NO: 1377908 - RNA, 20 nt, Human
uguucaaaaacacaguugau

SEQ ID NO: 1377909 - RNA, 22 nt, Human
uucaaaacuuuccaacuggucu

SEQ ID NO: 1377910 - RNA, 24 nt, Human
uuccccugaccuuuaaaaauccac

SEQ ID NO: 1377911 - RNA, 20 nt, Human
uucuccuggccacaucccgu

SEQ ID NO: 1377912 - RNA, 23 nt, Human
uugcauuuuuuaacaaauaauuu

SEQ ID NO: 1377913 - RNA, 18 nt, Human
uuuccaguacaaggaagg

SEQ ID NO: 1377914 - RNA, 20 nt, Human
aaaaauaacuugcugaagac

SEQ ID NO: 1377915 - RNA, 24 nt, Human
aaagugcugagauuacagguguga

SEQ ID NO: 1377916 - RNA, 24 nt, Human
aaagugcugggauuacaggcguga

SEQ ID NO: 1377917 - RNA, 22 nt, Human
aaccucuuccucaauccuccug

SEQ ID NO: 1377918 - RNA, 18 nt, Human
aacugaguccagaacuga

SEQ ID NO: 1377919 - RNA, 23 nt, Human
aagaggagguggagaagggggac

SEQ ID NO: 1377920 - RNA, 26 nt, Human
aagugcugagauuacaggugugagcc

SEQ ID NO: 1377921 - RNA, 19 nt, Human
aagugcugggauuacaggc

SEQ ID NO: 1377922 - RNA, 19 nt, Human
aagugcugggauuacaggc

SEQ ID NO: 1377923 - RNA, 26 nt, Human
aagugcugggauuacaggcgugagcc

SEQ ID NO: 1377924 - RNA, 23 nt, Human
acacaccaacccuggaggcaugu

SEQ ID NO: 1377925 - RNA, 20 nt, Human
acaccaacccuggaggcaug

SEQ ID NO: 1377926 - RNA, 19 nt, Human
acaggcgcccgccaccacg

SEQ ID NO: 1377927 - RNA, 24 nt, Human
accauguuggccaggauugucucg

SEQ ID NO: 1377928 - RNA, 24 nt, Human
accguguugccuaagcuggucucg

SEQ ID NO: 1377929 - RNA, 21 nt, Human
accucuuccucaauccuccug

SEQ ID NO: 1377930 - RNA, 21 nt, Human
accuugucauccaccugccuc

SEQ ID NO: 1377931 - RNA, 18 nt, Human
acgggguuucaccauguu

SEQ ID NO: 1377932 - RNA, 23 nt, Human
acgggguuucaccauguuggcca

SEQ ID NO: 1377933 - RNA, 24 nt, Human
acgggguuucaccauguuggccag

SEQ ID NO: 1377934 - RNA, 21 nt, Human
agacaagggaaacugagucca

SEQ ID NO: 1377935 - RNA, 19 nt, Human
agacuacaagcgugugcca

SEQ ID NO: 1377936 - RNA, 19 nt, Human
agagaugggguuucaccgu

SEQ ID NO: 1377937 - RNA, 23 nt, Human
agaggagguggagaaggcuuggg

SEQ ID NO: 1377938 - RNA, 23 nt, Human
agauuacaggugugagccacugc

SEQ ID NO: 1377939 - RNA, 18 nt, Human
agcucccucccucuggag

SEQ ID NO: 1377940 - RNA, 20 nt, Human
agcucccucccucuggagga

SEQ ID NO: 1377941 - RNA, 24 nt, Human
agcuggucucgaacuccuaggcuc

SEQ ID NO: 1377942 - RNA, 22 nt, Human
aggaaacgacucaacgcgcagc

SEQ ID NO: 1377943 - RNA, 19 nt, Human
aggaggaggcgagccgcag

SEQ ID NO: 1377944 - RNA, 25 nt, Human
aggcuggagugcaguggcgcgaucu

SEQ ID NO: 1377945 - RNA, 18 nt, Human
agggagggggaggagaga

SEQ ID NO: 1377946 - RNA, 18 nt, Human
aguagcuggggcuacagg

SEQ ID NO: 1377947 - RNA, 22 nt, Human
aguccagaacugaaugagaagc

SEQ ID NO: 1377948 - RNA, 24 nt, Human
agucccgcgguggggacuguggga

SEQ ID NO: 1377949 - RNA, 20 nt, Human
agugcaguggcgcgaucucg

SEQ ID NO: 1377950 - RNA, 23 nt, Human
agugcaguggcgcgaucucggcu

SEQ ID NO: 1377951 - RNA, 24 nt, Human
agugcaguggcgcgaucucggcuc

SEQ ID NO: 1377952 - RNA, 20 nt, Human
agugugauggcgugaucucg

SEQ ID NO: 1377953 - RNA, 22 nt, Human
agugugauggcgugaucucggc

SEQ ID NO: 1377954 - RNA, 24 nt, Human
auauuuguauuuuuaguagagacg

SEQ ID NO: 1377955 - RNA, 21 nt, Human
auccuccugcuucagccuccc

SEQ ID NO: 1377956 - RNA, 21 nt, Human
auggccggagucgggcgaagc

SEQ ID NO: 1377957 - RNA, 18 nt, Human
augggguuucaccguguu

SEQ ID NO: 1377958 - RNA, 19 nt, Human
augggguuucaccguguug

SEQ ID NO: 1377959 - RNA, 30 nt, Human
auuauuucgugugugugugugugugugugg

SEQ ID NO: 1377960 - RNA, 21 nt, Human
auucuccugccucagccuccc

SEQ ID NO: 1377961 - RNA, 21 nt, Human
auuuccucagcuuuucugcua

SEQ ID NO: 1377962 - RNA, 24 nt, Human
caaagugcugagauuacaggugug

SEQ ID NO: 1377963 - RNA, 24 nt, Human
caaagugcugggauuacaggcgug

SEQ ID NO: 1377964 - RNA, 22 nt, Human
caagcaauucuccugccucagc

SEQ ID NO: 1377965 - RNA, 20 nt, Human
caaugcgcccuccuccgccu

SEQ ID NO: 1377966 - RNA, 18 nt, Human
caccauguuggccaggau

SEQ ID NO: 1377967 - RNA, 24 nt, Human
caccauguuggccaggauugucuc

SEQ ID NO: 1377968 - RNA, 24 nt, Human
caccguguugccuaagcuggucuc

SEQ ID NO: 1377969 - RNA, 23 nt, Human
caccugccucggccucccaaagu

SEQ ID NO: 1377970 - RNA, 18 nt, Human
caccugucuaauuuuugu

SEQ ID NO: 1377971 - RNA, 24 nt, Human
caccuugucauccaccugccucgg

SEQ ID NO: 1377972 - RNA, 23 nt, Human
caccuugucauccaccugccucu

SEQ ID NO: 1377973 - RNA, 22 nt, Human
caccuuucccuucuccucucuc

SEQ ID NO: 1377974 - RNA, 19 nt, Human
cagacuacaagcgugugcc

SEQ ID NO: 1377975 - RNA, 21 nt, Human
cagccucccgaguagcugggg

SEQ ID NO: 1377976 - RNA, 19 nt, Human
cagggagguagguugucau

SEQ ID NO: 1377977 - RNA, 19 nt, Human
caguagaagauuccacauc

SEQ ID NO: 1377978 - RNA, 23 nt, Human
caguagaagauuccacaucugga

SEQ ID NO: 1377979 - RNA, 23 nt, Human
caguuugccccuuuagcccucca

SEQ ID NO: 1377980 - RNA, 19 nt, Human
cauccuccaucaccaggcu

SEQ ID NO: 1377981 - RNA, 21 nt, Human
ccaaagugcugagauuacagg

SEQ ID NO: 1377982 - RNA, 21 nt, Human
ccaaagugcugagauuacagg

SEQ ID NO: 1377983 - RNA, 24 nt, Human
ccaaagugcugagauuacaggugu

SEQ ID NO: 1377984 - RNA, 20 nt, Human
ccaaagugcugggauuacag

SEQ ID NO: 1377985 - RNA, 22 nt, Human
ccaaagugcugggauuacaggc

SEQ ID NO: 1377986 - RNA, 22 nt, Human
ccaaagugcugggauuacaggc

SEQ ID NO: 1377987 - RNA, 24 nt, Human
ccaaagugcugggauuacaggcgu

SEQ ID NO: 1377988 - RNA, 18 nt, Human
ccacugcgcccagccuaa

SEQ ID NO: 1377989 - RNA, 18 nt, Human
ccacugcgcccagccuaa

SEQ ID NO: 1377990 - RNA, 19 nt, Human
ccacugcgcccagccuaau

SEQ ID NO: 1377991 - RNA, 24 nt, Human
cccccucuuccucacuucccugua

SEQ ID NO: 1377992 - RNA, 24 nt, Human
cccgaguagcuggggcuacaggcg

SEQ ID NO: 1377993 - RNA, 24 nt, Human
cccgcgguggggacugugggaggc

SEQ ID NO: 1377994 - RNA, 20 nt, Human
cccggguucaagcaauucuc

SEQ ID NO: 1377995 - RNA, 23 nt, Human
cccggguucaagcaauucuccug

SEQ ID NO: 1377996 - RNA, 24 nt, Human
ccgcccggguucaagcaauucucc

SEQ ID NO: 1377997 - RNA, 25 nt, Human
ccgccgcccggguucaagcaauucu

SEQ ID NO: 1377998 - RNA, 18 nt, Human
ccgccgcugccgccgcca

SEQ ID NO: 1377999 - RNA, 24 nt, Human
ccuaggcucaagcaaugcgcccuc

SEQ ID NO: 1378000 - RNA, 20 nt, Human
ccuaggcugcagugugaugg

SEQ ID NO: 1378001 - RNA, 26 nt, Human
ccuccugcuucagccucccaaguagc

SEQ ID NO: 1378002 - RNA, 23 nt, Human
ccugccucagccucccgaguagc

SEQ ID NO: 1378003 - RNA, 24 nt, Human
ccugccucggccucccaaagugcu

SEQ ID NO: 1378004 - RNA, 26 nt, Human
cgcccucgauccccucgccgcggucc

SEQ ID NO: 1378005 - RNA, 22 nt, Human
cgccgcggccuccaaccaccgg

SEQ ID NO: 1378006 - RNA, 24 nt, Human
cgcucugucaccuaggcugcagug

SEQ ID NO: 1378007 - RNA, 23 nt, Human
cgcuuugcgaggggaaacgaucc

SEQ ID NO: 1378008 - RNA, 19 nt, Human
cggccacccuggcaauucc

SEQ ID NO: 1378009 - RNA, 18 nt, Human
cgggagggauccgcggug

SEQ ID NO: 1378010 - RNA, 26 nt, Human
cguacgcgugcgggcugacgugcgcg

SEQ ID NO: 1378011 - RNA, 23 nt, Human
cgugugugugugugugugugugu

SEQ ID NO: 1378012 - RNA, 22 nt, Human
cguguguguguguguguguguu

SEQ ID NO: 1378013 - RNA, 21 nt, Human
cuaauuccacuuuacauauau

SEQ ID NO: 1378014 - RNA, 23 nt, Human
cuaggcugcagugugauggcgug

SEQ ID NO: 1378015 - RNA, 24 nt, Human
cucacuucccuguacucucaucgc

SEQ ID NO: 1378016 - RNA, 24 nt, Human
cucagccucccgaguagcuggggc

SEQ ID NO: 1378017 - RNA, 21 nt, Human
cucccaaagugcugagauuac

SEQ ID NO: 1378018 - RNA, 19 nt, Human
cuccugccccugcagccgc

SEQ ID NO: 1378019 - RNA, 23 nt, Human
cucgcuuugucgccaggcuggag

SEQ ID NO: 1378020 - RNA, 21 nt, Human
cugccgccgcugccgccgcca

SEQ ID NO: 1378021 - RNA, 23 nt, Human
cugccucagccucccgaguagcu

SEQ ID NO: 1378022 - RNA, 23 nt, Human
cugcuucagccucccaaguagcu

SEQ ID NO: 1378023 - RNA, 19 nt, Human
cuuugucgccaggcuggag

SEQ ID NO: 1378024 - RNA, 20 nt, Human
gaacgcgaggagggaggagu

SEQ ID NO: 1378025 - RNA, 18 nt, Human
gaccucugggagagcagu

SEQ ID NO: 1378026 - RNA, 24 nt, Human
gacggagucucgcuuugucgccag

SEQ ID NO: 1378027 - RNA, 24 nt, Human
gagacgggguuucaccauguuggc

SEQ ID NO: 1378028 - RNA, 23 nt, Human
gagaugggguuucaccguguugc

SEQ ID NO: 1378029 - RNA, 21 nt, Human
gagcugccgcggccacucugc

SEQ ID NO: 1378030 - RNA, 22 nt, Human
gaggagugggagguugggggug

SEQ ID NO: 1378031 - RNA, 20 nt, Human
gagggagggggaggagagaa

SEQ ID NO: 1378032 - RNA, 22 nt, Human
gaugggguuucaccguguugcc

SEQ ID NO: 1378033 - RNA, 18 nt, Human
gauuacaggcgugagcca

SEQ ID NO: 1378034 - RNA, 22 nt, Human
gauuacaggcgugagccaccgc

SEQ ID NO: 1378035 - RNA, 22 nt, Human
gauuacaggcgugagccaccgc

SEQ ID NO: 1378036 - RNA, 18 nt, Human
gauuacaggugugagcca

SEQ ID NO: 1378037 - RNA, 22 nt, Human
gauuacaggugugagccacugc

SEQ ID NO: 1378038 - RNA, 21 nt, Human
gcauguuuggaguugccuaau

SEQ ID NO: 1378039 - RNA, 19 nt, Human
gccaggaauggaacagucc

SEQ ID NO: 1378040 - RNA, 22 nt, Human
gcgagccgcagcgccgcggcga

SEQ ID NO: 1378041 - RNA, 20 nt, Human
gcgcuaggccgcccucgauc

SEQ ID NO: 1378042 - RNA, 21 nt, Human
gcgguugguggccgugcgggc

SEQ ID NO: 1378043 - RNA, 18 nt, Human
gcuaggcgcccuuagcuc

SEQ ID NO: 1378044 - RNA, 19 nt, Human
ggacccagggaagcggagg

SEQ ID NO: 1378045 - RNA, 21 nt, Human
ggagaacugggcgaggagguu

SEQ ID NO: 1378046 - RNA, 18 nt, Human
ggaggagagaagaggagg

SEQ ID NO: 1378047 - RNA, 23 nt, Human
ggagggggaggagagaagaggag

SEQ ID NO: 1378048 - RNA, 19 nt, Human
ggagguucccgugggugag

SEQ ID NO: 1378049 - RNA, 18 nt, Human
ggagugggagguuggggg

SEQ ID NO: 1378050 - RNA, 19 nt, Human
ggccacucugcugccgccg

SEQ ID NO: 1378051 - RNA, 24 nt, Human
ggcggcgguugguggccgugcggg

SEQ ID NO: 1378052 - RNA, 21 nt, Human
ggcugcuuuggcggcgguugg

SEQ ID NO: 1378053 - RNA, 20 nt, Human
gggaagcggaggagccuggc

SEQ ID NO: 1378054 - RNA, 19 nt, Human
gggagguugggggugucgc

SEQ ID NO: 1378055 - RNA, 23 nt, Human
gggguuucaccauguuggccagg

SEQ ID NO: 1378056 - RNA, 22 nt, Human
ggguuucaccauguuggccagg

SEQ ID NO: 1378057 - RNA, 21 nt, Human
gguggugguuggugggagcag

SEQ ID NO: 1378058 - RNA, 19 nt, Human
gguuggugggagcagccag

SEQ ID NO: 1378059 - RNA, 19 nt, Human
guagacacucguacgcgug

SEQ ID NO: 1378060 - RNA, 23 nt, Human
guagagacgggguuucaccaugu

SEQ ID NO: 1378061 - RNA, 19 nt, Human
guagagaugggguuucacc

SEQ ID NO: 1378062 - RNA, 19 nt, Human
guagagaugggguuucacc

SEQ ID NO: 1378063 - RNA, 24 nt, Human
gucucgcuuugucgccaggcugga

SEQ ID NO: 1378064 - RNA, 29 nt, Human
gugcuggcggcggcugcuuuggcggcgac

SEQ ID NO: 1378065 - RNA, 23 nt, Human
uaauauuuguauuuuuaguagag

SEQ ID NO: 1378066 - RNA, 24 nt, Human
uaauauuuguauuuuuaguagaga

SEQ ID NO: 1378067 - RNA, 25 nt, Human
uaauuuuugugucuuuuuguagaga

SEQ ID NO: 1378068 - RNA, 24 nt, Human
uacaggcgugagccaccgcgccca

SEQ ID NO: 1378069 - RNA, 19 nt, Human
uacaggugugagccacugc

SEQ ID NO: 1378070 - RNA, 24 nt, Human
uacaggugugagccacugcgccca

SEQ ID NO: 1378071 - RNA, 22 nt, Human
uagagacgggguuucaccaugu

SEQ ID NO: 1378072 - RNA, 24 nt, Human
uagcucccucccucuggaggagcu

SEQ ID NO: 1378073 - RNA, 19 nt, Human
uagggugggggugcuggcg

SEQ ID NO: 1378074 - RNA, 20 nt, Human
uagggugggggugcuggcgg

SEQ ID NO: 1378075 - RNA, 24 nt, Human
uaguagagacgggguuucaccaug

SEQ ID NO: 1378076 - RNA, 25 nt, Human
uaguagagacgggguuucaccaugu

SEQ ID NO: 1378077 - RNA, 18 nt, Human
ucacugcaacuuccgccg

SEQ ID NO: 1378078 - RNA, 21 nt, Human
ucacugcaacuuccgccgccc

SEQ ID NO: 1378079 - RNA, 24 nt, Human
ucacugcaacuuccgccgcccggg

SEQ ID NO: 1378080 - RNA, 21 nt, Human
ucagccucccaaguagcucag

SEQ ID NO: 1378081 - RNA, 23 nt, Human
ucagccucccgaguagcuggggc

SEQ ID NO: 1378082 - RNA, 18 nt, Human
uccagaacugaaugagaa

SEQ ID NO: 1378083 - RNA, 23 nt, Human
ucccaaagugcugagauuacagg

SEQ ID NO: 1378084 - RNA, 24 nt, Human
ucccaaagugcugggauuacaggc

SEQ ID NO: 1378085 - RNA, 25 nt, Human
ucccagugucgguugcgggauccgc

SEQ ID NO: 1378086 - RNA, 19 nt, Human
ucccauggaggaggaggcg

SEQ ID NO: 1378087 - RNA, 24 nt, Human
ucccgaguagcuggggcuacaggc

SEQ ID NO: 1378088 - RNA, 20 nt, Human
ucccuguacucucaucgcuc

SEQ ID NO: 1378089 - RNA, 20 nt, Human
uccgacacggugaguagaac

SEQ ID NO: 1378090 - RNA, 18 nt, Human
uccuaggcucaagcaaug

SEQ ID NO: 1378091 - RNA, 21 nt, Human
uccuccaucaccaggcugucu

SEQ ID NO: 1378092 - RNA, 21 nt, Human
uccuccgccucccaaagugcu

SEQ ID NO: 1378093 - RNA, 18 nt, Human
uccugggcuuucugggag

SEQ ID NO: 1378094 - RNA, 24 nt, Human
ucgccaggcuggagugcaguggcg

SEQ ID NO: 1378095 - RNA, 20 nt, Human
ucgcuaggcgcccuuagcuc

SEQ ID NO: 1378096 - RNA, 18 nt, Human
ucggccucccaaagugcu

SEQ ID NO: 1378097 - RNA, 21 nt, Human
ucucccggaccuggaccucug

SEQ ID NO: 1378098 - RNA, 24 nt, Human
ucuccugccucagccucccgagua

SEQ ID NO: 1378099 - RNA, 23 nt, Human
ucucgaacuccuaggcucaagca

SEQ ID NO: 1378100 - RNA, 19 nt, Human
ucucgcucugucaccuagg

SEQ ID NO: 1378101 - RNA, 22 nt, Human
ucucgcucugucaccuaggcug

SEQ ID NO: 1378102 - RNA, 26 nt, Human
ucucgcucugucaccuaggcugcagu

SEQ ID NO: 1378103 - RNA, 27 nt, Human
ucucgcucugucaccuaggcugcagug

SEQ ID NO: 1378104 - RNA, 21 nt, Human
ucucgcuuugucgccaggcug

SEQ ID NO: 1378105 - RNA, 22 nt, Human
ucucgcuuugucgccaggcugg

SEQ ID NO: 1378106 - RNA, 23 nt, Human
ucucgcuuugucgccaggcugga

SEQ ID NO: 1378107 - RNA, 22 nt, Human
ucucucagcgauugaauccugg

SEQ ID NO: 1378108 - RNA, 20 nt, Human
ucuuucuuuuuuugagacag

SEQ ID NO: 1378109 - RNA, 21 nt, Human
ucuuuuuuugagacagggucu

SEQ ID NO: 1378110 - RNA, 26 nt, Human
ugaaaaauauauccucauuaaucuaa

SEQ ID NO: 1378111 - RNA, 22 nt, Human
ugagacagggucucgcucuguc

SEQ ID NO: 1378112 - RNA, 19 nt, Human
ugagauuacaggugugagc

SEQ ID NO: 1378113 - RNA, 21 nt, Human
ugagauuacaggugugagcca

SEQ ID NO: 1378114 - RNA, 22 nt, Human
ugagauuacaggugugagccac

SEQ ID NO: 1378115 - RNA, 22 nt, Human
ugagauuacaggugugagccac

SEQ ID NO: 1378116 - RNA, 24 nt, Human
ugagauuacaggugugagccacug

SEQ ID NO: 1378117 - RNA, 22 nt, Human
ugcaguggcgcgaucucggcuc

SEQ ID NO: 1378118 - RNA, 24 nt, Human
ugcagugugauggcgugaucucgg

SEQ ID NO: 1378119 - RNA, 24 nt, Human
ugccuaagcuggucucgaacuccu

SEQ ID NO: 1378120 - RNA, 24 nt, Human
ugccucagccucccgaguagcugg

SEQ ID NO: 1378121 - RNA, 21 nt, Human
ugccucggccucccaaagugc

SEQ ID NO: 1378122 - RNA, 24 nt, Human
ugccucggccucccaaagugcugg

SEQ ID NO: 1378123 - RNA, 20 nt, Human
ugcgaggggaaacgauccca

SEQ ID NO: 1378124 - RNA, 22 nt, Human
ugcgcccuccuccgccucccaa

SEQ ID NO: 1378125 - RNA, 19 nt, Human
ugcgcuggagccggcuuga

SEQ ID NO: 1378126 - RNA, 24 nt, Human
ugcugagauuacaggugugagcca

SEQ ID NO: 1378127 - RNA, 18 nt, Human
ugcuggcggcggcugcuu

SEQ ID NO: 1378128 - RNA, 24 nt, Human
ugcugggauuacaggcgugagcca

SEQ ID NO: 1378129 - RNA, 20 nt, Human
ugcuucagccucccaaguag

SEQ ID NO: 1378130 - RNA, 24 nt, Human
ugcuucagccucccaaguagcuca

SEQ ID NO: 1378131 - RNA, 23 nt, Human
uggagugcaguggcgcgaucucg

SEQ ID NO: 1378132 - RNA, 24 nt, Human
uggagugcaguggcgcgaucucgg

SEQ ID NO: 1378133 - RNA, 23 nt, Human
uggcggccacccccucuuccuca

SEQ ID NO: 1378134 - RNA, 21 nt, Human
uggcggcgguugguggccgug

SEQ ID NO: 1378135 - RNA, 20 nt, Human
ugggagagcaguggugaaga

SEQ ID NO: 1378136 - RNA, 18 nt, Human
ugggauuacaggcgugag

SEQ ID NO: 1378137 - RNA, 19 nt, Human
ugggauuacaggcgugagc

SEQ ID NO: 1378138 - RNA, 21 nt, Human
ugggauuacaggcgugagcca

SEQ ID NO: 1378139 - RNA, 22 nt, Human
ugggauuacaggcgugagccac

SEQ ID NO: 1378140 - RNA, 23 nt, Human
ugggauuacaggcgugagccacc

SEQ ID NO: 1378141 - RNA, 24 nt, Human
ugggauuacaggcgugagccaccg

SEQ ID NO: 1378142 - RNA, 20 nt, Human
ugggcucgcgccgcugaagg

SEQ ID NO: 1378143 - RNA, 21 nt, Human
uggggcuacaggcgcccgcca

SEQ ID NO: 1378144 - RNA, 22 nt, Human
uggggcuacaggcgcccgccac

SEQ ID NO: 1378145 - RNA, 24 nt, Human
uggggcuacaggcgcccgccacca

SEQ ID NO: 1378146 - RNA, 18 nt, Human
ugggguuucaccguguug

SEQ ID NO: 1378147 - RNA, 19 nt, Human
ugggugagcgcguacggga

SEQ ID NO: 1378148 - RNA, 24 nt, Human
uguagagaugggguuucaccgugu

SEQ ID NO: 1378149 - RNA, 21 nt, Human
uguauuuuuaguagagacggg

SEQ ID NO: 1378150 - RNA, 18 nt, Human
ugugugugugugugugug

SEQ ID NO: 1378151 - RNA, 21 nt, Human
ugugugugugugugugugacg

SEQ ID NO: 1378152 - RNA, 18 nt, Human
uuaguagagacgggguuu

SEQ ID NO: 1378153 - RNA, 22 nt, Human
uuaguagagacgggguuucacc

SEQ ID NO: 1378154 - RNA, 24 nt, Human
uuaguagagacgggguuucaccau

SEQ ID NO: 1378155 - RNA, 21 nt, Human
uucaagcaauucuccugccuc

SEQ ID NO: 1378156 - RNA, 24 nt, Human
uucaagcaauucuccugccucagc

SEQ ID NO: 1378157 - RNA, 24 nt, Human
uuccagucaaacggcaagccagac

SEQ ID NO: 1378158 - RNA, 22 nt, Human
uuccucuccugccccugcagcc

SEQ ID NO: 1378159 - RNA, 22 nt, Human
uugagacagggucucgcucugu

SEQ ID NO: 1378160 - RNA, 23 nt, Human
uugcaaccucuuccucaauccuc

SEQ ID NO: 1378161 - RNA, 18 nt, Human
uuggugggagcagccagc

SEQ ID NO: 1378162 - RNA, 24 nt, Human
uuguagagaugggguuucaccgug

SEQ ID NO: 1378163 - RNA, 23 nt, Human
uuguauuuuuaguagagacgggg

SEQ ID NO: 1378164 - RNA, 19 nt, Human
uuucacacaccaacccugg

SEQ ID NO: 1378165 - RNA, 19 nt, Human
uuucaccauguuggccagg

SEQ ID NO: 1378166 - RNA, 23 nt, Human
uuucugcuaaugucuucuuucuu

SEQ ID NO: 1378167 - RNA, 19 nt, Human
uuucuuuuuuugagacagg

SEQ ID NO: 1378168 - RNA, 25 nt, Human
uuugcaaccucuuccucaauccucc

SEQ ID NO: 1378169 - RNA, 24 nt, Human
uuuguagagaugggguuucaccgu

SEQ ID NO: 1378170 - RNA, 23 nt, Human
uuugucgccaggcuggagugcag

SEQ ID NO: 1378171 - RNA, 24 nt, Human
uuuuuaguagagacgggguuucac

SEQ ID NO: 1378172 - RNA, 23 nt, Human
uuuuuguagagaugggguuucac

SEQ ID NO: 1378173 - RNA, 26 nt, Human
aaaaaaaaaaaacaaaacaaaaccag

SEQ ID NO: 1378174 - RNA, 21 nt, Human
aaaaaaacaaaacaaaaccag

SEQ ID NO: 1378175 - RNA, 19 nt, Human
aaagaagccaauuucaggg

SEQ ID NO: 1378176 - RNA, 22 nt, Human
aaagcagaaaaaaaaacaucau

SEQ ID NO: 1378177 - RNA, 22 nt, Human
aaauacaauucagcacaaaaca

SEQ ID NO: 1378178 - RNA, 18 nt, Human
aacauggugaaacccauc

SEQ ID NO: 1378179 - RNA, 19 nt, Human
aacauggugaaacccaucu

SEQ ID NO: 1378180 - RNA, 20 nt, Human
aacauggugaaacccaucuc

SEQ ID NO: 1378181 - RNA, 20 nt, Human
aaccuugccucauccacccc

SEQ ID NO: 1378182 - RNA, 21 nt, Human
aagcagaaaaaaaaacaggga

SEQ ID NO: 1378183 - RNA, 19 nt, Human
aagcagaaaaaaaaacauc

SEQ ID NO: 1378184 - RNA, 23 nt, Human
aagcagaaaaaaaaacaucauug

SEQ ID NO: 1378185 - RNA, 21 nt, Human
aagcuaaccucauuacaacau

SEQ ID NO: 1378186 - RNA, 19 nt, Human
acaaaacaaaaccagaggc

SEQ ID NO: 1378187 - RNA, 20 nt, Human
acaagagcgaaacuccaccu

SEQ ID NO: 1378188 - RNA, 22 nt, Human
agaaauuuucuucuacaacuaa

SEQ ID NO: 1378189 - RNA, 18 nt, Human
agacaugcaaguauaugg

SEQ ID NO: 1378190 - RNA, 21 nt, Human
agagaagcccaauaaaaagaa

SEQ ID NO: 1378191 - RNA, 18 nt, Human
agagguugcagugaguug

SEQ ID NO: 1378192 - RNA, 22 nt, Human
agagguugcagugaguugagau

SEQ ID NO: 1378193 - RNA, 23 nt, Human
agagguugcagugaguugagauc

SEQ ID NO: 1378194 - RNA, 24 nt, Human
agcacuuugggaggccgaggcggg

SEQ ID NO: 1378195 - RNA, 22 nt, Human
agccuggccaacauggugaaac

SEQ ID NO: 1378196 - RNA, 24 nt, Human
agccuggccaacauggugaaaccc

SEQ ID NO: 1378197 - RNA, 24 nt, Human
agcgccuugcaaagcagaaaaaaa

SEQ ID NO: 1378198 - RNA, 21 nt, Human
aggccgaggcggguggaucac

SEQ ID NO: 1378199 - RNA, 19 nt, Human
aggccgggcacgguggcuc

SEQ ID NO: 1378200 - RNA, 22 nt, Human
aggcggguggaucaccugaggg

SEQ ID NO: 1378201 - RNA, 22 nt, Human
aggcggguggaucaccugaggu

SEQ ID NO: 1378202 - RNA, 24 nt, Human
aggcugagggaggagaaucacuug

SEQ ID NO: 1378203 - RNA, 24 nt, Human
agggaggagaaucacuugaaccug

SEQ ID NO: 1378204 - RNA, 25 nt, Human
agguaaucagcaaauacaauucagc

SEQ ID NO: 1378205 - RNA, 21 nt, Human
auaaaaagaaaagaugggaau

SEQ ID NO: 1378206 - RNA, 19 nt, Human
auaaaagauucuagcgccu

SEQ ID NO: 1378207 - RNA, 25 nt, Human
auaaaagauucuagcgccuugcaaa

SEQ ID NO: 1378208 - RNA, 21 nt, Human
aucaaguuugauaaaauccaa

SEQ ID NO: 1378209 - RNA, 21 nt, Human
augaagcaaagcuaaccucau

SEQ ID NO: 1378210 - RNA, 21 nt, Human
augcucgugggugccuguaau

SEQ ID NO: 1378211 - RNA, 22 nt, Human
auggugagacagcucugggaac

SEQ ID NO: 1378212 - RNA, 19 nt, Human
caaaacaaaaccagaggcc

SEQ ID NO: 1378213 - RNA, 19 nt, Human
caaaauuuucuucugcaga

SEQ ID NO: 1378214 - RNA, 21 nt, Human
caaaccucugaugacuuccaa

SEQ ID NO: 1378215 - RNA, 21 nt, Human
caaauacaauucagcacaaaa

SEQ ID NO: 1378216 - RNA, 26 nt, Human
caaauacaauucagcacaaaacacaa

SEQ ID NO: 1378217 - RNA, 23 nt, Human
caacauggugaaacccaucucua

SEQ ID NO: 1378218 - RNA, 25 nt, Human
caacuaaaaugagguuuggagucca

SEQ ID NO: 1378219 - RNA, 20 nt, Human
caccugaggucuggaauucg

SEQ ID NO: 1378220 - RNA, 22 nt, Human
caccugaggucuggaauucgag

SEQ ID NO: 1378221 - RNA, 19 nt, Human
caccuguaaucccagcacu

SEQ ID NO: 1378222 - RNA, 24 nt, Human
caccuguaaucccagcacuuuggg

SEQ ID NO: 1378223 - RNA, 24 nt, Human
cacuccagcccgggcaacaagagc

SEQ ID NO: 1378224 - RNA, 25 nt, Human
cagcaaauacaauucagcacaaaac

SEQ ID NO: 1378225 - RNA, 24 nt, Human
cagcacuuugggaggccgaggcgg

SEQ ID NO: 1378226 - RNA, 21 nt, Human
cagcccgggcaacaagagcga

SEQ ID NO: 1378227 - RNA, 25 nt, Human
cagcggacgccuccugcgacggucc

SEQ ID NO: 1378228 - RNA, 21 nt, Human
cagcucuuaagaugcuccggg

SEQ ID NO: 1378229 - RNA, 19 nt, Human
cauugcacuccagcccggg

SEQ ID NO: 1378230 - RNA, 21 nt, Human
cauugcacuccagcccgggca

SEQ ID NO: 1378231 - RNA, 22 nt, Human
cauugcacuccagcccgggcaa

SEQ ID NO: 1378232 - RNA, 23 nt, Human
cauugcacuccagcccgggcaac

SEQ ID NO: 1378233 - RNA, 24 nt, Human
cauugcacuccagcccgggcaaca

SEQ ID NO: 1378234 - RNA, 23 nt, Human
cauugcuaagaacugaucugcag

SEQ ID NO: 1378235 - RNA, 18 nt, Human
ccaccucaaaaaaaauaa

SEQ ID NO: 1378236 - RNA, 19 nt, Human
ccagagaagcccaauaaaa

SEQ ID NO: 1378237 - RNA, 20 nt, Human
ccauugcacuccagcccggg

SEQ ID NO: 1378238 - RNA, 21 nt, Human
ccauugcacuccagcccgggc

SEQ ID NO: 1378239 - RNA, 22 nt, Human
ccauugcacuccagcccgggca

SEQ ID NO: 1378240 - RNA, 24 nt, Human
ccauugcacuccagcccgggcaac

SEQ ID NO: 1378241 - RNA, 23 nt, Human
cccauuaaaaaaaaaaaacaaaa

SEQ ID NO: 1378242 - RNA, 20 nt, Human
cccuccacaucccuccccag

SEQ ID NO: 1378243 - RNA, 22 nt, Human
cccucucuuuugucccccauua

SEQ ID NO: 1378244 - RNA, 24 nt, Human
ccggccccuaguugucagcugcgc

SEQ ID NO: 1378245 - RNA, 19 nt, Human
ccucuagaccuugagguca

SEQ ID NO: 1378246 - RNA, 23 nt, Human
ccucuuucuccugcaaaccuugc

SEQ ID NO: 1378247 - RNA, 22 nt, Human
ccuggccaacauggugaaaccc

SEQ ID NO: 1378248 - RNA, 23 nt, Human
ccuggccaacauggugaaaccca

SEQ ID NO: 1378249 - RNA, 19 nt, Human
ccuguaaucccagcuacuu

SEQ ID NO: 1378250 - RNA, 21 nt, Human
ccuguaaucccagcuacuugg

SEQ ID NO: 1378251 - RNA, 22 nt, Human
cgaaacuccaccucaaaaaaaa

SEQ ID NO: 1378252 - RNA, 24 nt, Human
cgagaccagccuggccaacauggu

SEQ ID NO: 1378253 - RNA, 20 nt, Human
cgaggcagcagcuguagagc

SEQ ID NO: 1378254 - RNA, 20 nt, Human
cgaggcggguggaucaccug

SEQ ID NO: 1378255 - RNA, 24 nt, Human
cgaggcggguggaucaccugaggu

SEQ ID NO: 1378256 - RNA, 24 nt, Human
cgcaccuguaaucccagcacuuug

SEQ ID NO: 1378257 - RNA, 19 nt, Human
cgcugagcuaaggaugcag

SEQ ID NO: 1378258 - RNA, 24 nt, Human
cggguggaucaccugaggucugga

SEQ ID NO: 1378259 - RNA, 19 nt, Human
cuccauggucggcauuucc

SEQ ID NO: 1378260 - RNA, 18 nt, Human
cuccggggaugcgcugag

SEQ ID NO: 1378261 - RNA, 24 nt, Human
cucgcaccuguaaucccagcacuu

SEQ ID NO: 1378262 - RNA, 23 nt, Human
cucugucaucuuuuuccccucca

SEQ ID NO: 1378263 - RNA, 23 nt, Human
cuggagggcagagguugcaguga

SEQ ID NO: 1378264 - RNA, 18 nt, Human
cuuacugcagaccucuag

SEQ ID NO: 1378265 - RNA, 19 nt, Human
cuuucccucucuuuugucc

SEQ ID NO: 1378266 - RNA, 19 nt, Human
cuuucccucucuuuugucc

SEQ ID NO: 1378267 - RNA, 21 nt, Human
gacugccuuuuacuacuucau

SEQ ID NO: 1378268 - RNA, 23 nt, Human
gagaucucaccauugcacuccag

SEQ ID NO: 1378269 - RNA, 23 nt, Human
gauauaagaggcaauaaaaagaa

SEQ ID NO: 1378270 - RNA, 18 nt, Human
gaucaccugaggucugga

SEQ ID NO: 1378271 - RNA, 24 nt, Human
gaucaccugaggucuggaauucga

SEQ ID NO: 1378272 - RNA, 21 nt, Human
gauuuauaggggucuuucccu

SEQ ID NO: 1378273 - RNA, 19 nt, Human
gcaaaauuuucuucugcag

SEQ ID NO: 1378274 - RNA, 18 nt, Human
gcaaauacaauucagcac

SEQ ID NO: 1378275 - RNA, 24 nt, Human
gcauuuccagaaaaacaaaggcca

SEQ ID NO: 1378276 - RNA, 24 nt, Human
gcucgugggugccuguaaucccag

SEQ ID NO: 1378277 - RNA, 23 nt, Human
ggcacgguggcucgcaccuguaa

SEQ ID NO: 1378278 - RNA, 18 nt, Human
ggcagagguugcagugag

SEQ ID NO: 1378279 - RNA, 23 nt, Human
ggcagagguugcagugaguugag

SEQ ID NO: 1378280 - RNA, 24 nt, Human
ggccaacauggugaaacccaucuc

SEQ ID NO: 1378281 - RNA, 23 nt, Human
gggagugggagaaauucuccaga

SEQ ID NO: 1378282 - RNA, 20 nt, Human
gggauuagaggagagaagaa

SEQ ID NO: 1378283 - RNA, 24 nt, Human
gggcaugcucgugggugccuguaa

SEQ ID NO: 1378284 - RNA, 23 nt, Human
gguggcucgcaccuguaauccca

SEQ ID NO: 1378285 - RNA, 24 nt, Human
gguggcucgcaccuguaaucccag

SEQ ID NO: 1378286 - RNA, 19 nt, Human
gugggugccuguaauccca

SEQ ID NO: 1378287 - RNA, 20 nt, Human
uaaagcaucuccauggucgg

SEQ ID NO: 1378288 - RNA, 21 nt, Human
uaagaugcuccggggaugcgc

SEQ ID NO: 1378289 - RNA, 21 nt, Human
uaauucuucaaaccucugaug

SEQ ID NO: 1378290 - RNA, 22 nt, Human
uacaacaucuaagcuauuugag

SEQ ID NO: 1378291 - RNA, 19 nt, Human
uagcagaagagcugauagc

SEQ ID NO: 1378292 - RNA, 19 nt, Human
ucaaccaagaaauggcugu

SEQ ID NO: 1378293 - RNA, 23 nt, Human
ucaaccaagaaauggcugucacu

SEQ ID NO: 1378294 - RNA, 19 nt, Human
uccaccucaaaaaaaauaa

SEQ ID NO: 1378295 - RNA, 19 nt, Human
ucuacaacuaaaaugaggu

SEQ ID NO: 1378296 - RNA, 19 nt, Human
ucuccauggucggcauuuc

SEQ ID NO: 1378297 - RNA, 24 nt, Human
ucucuacugaaaauacaaaaaauu

SEQ ID NO: 1378298 - RNA, 18 nt, Human
ucugucaucuuuuucccc

SEQ ID NO: 1378299 - RNA, 24 nt, Human
ucugucaucuuuuuccccuccaca

SEQ ID NO: 1378300 - RNA, 18 nt, Human
ugagaagacucuaaagca

SEQ ID NO: 1378301 - RNA, 19 nt, Human
ugagggaggagaaucacuu

SEQ ID NO: 1378302 - RNA, 20 nt, Human
ugagggaggagaaucacuug

SEQ ID NO: 1378303 - RNA, 24 nt, Human
ugagggaggagaaucacuugaacc

SEQ ID NO: 1378304 - RNA, 23 nt, Human
ugauagcaaaaauaccccauuuc

SEQ ID NO: 1378305 - RNA, 19 nt, Human
ugcaaagcagaaaaaaaaa

SEQ ID NO: 1378306 - RNA, 21 nt, Human
ugcaaagcagaaaaaaaaaca

SEQ ID NO: 1378307 - RNA, 22 nt, Human
ugcacuccagcccgggcaacaa

SEQ ID NO: 1378308 - RNA, 25 nt, Human
ugcacuccagcccgggcaacaagag

SEQ ID NO: 1378309 - RNA, 20 nt, Human
ugccucauccaccccaccuu

SEQ ID NO: 1378310 - RNA, 23 nt, Human
ugccuguaaucccagcuacuugg

SEQ ID NO: 1378311 - RNA, 24 nt, Human
ugccuguaaucccagcuacuuggg

SEQ ID NO: 1378312 - RNA, 19 nt, Human
ugccuuuuacuacuucaua

SEQ ID NO: 1378313 - RNA, 23 nt, Human
uggaauucgagaccagccuggcc

SEQ ID NO: 1378314 - RNA, 24 nt, Human
uggagggcagagguugcagugagu

SEQ ID NO: 1378315 - RNA, 24 nt, Human
uggaucaccugaggucuggaauuc

SEQ ID NO: 1378316 - RNA, 23 nt, Human
uggccaacauggugaaacccauc

SEQ ID NO: 1378317 - RNA, 21 nt, Human
uggcucgcaccuguaauccca

SEQ ID NO: 1378318 - RNA, 22 nt, Human
uggcucgcaccuguaaucccag

SEQ ID NO: 1378319 - RNA, 24 nt, Human
uggcucgcaccuguaaucccagca

SEQ ID NO: 1378320 - RNA, 23 nt, Human
ugggaggccgaggcggguggauc

SEQ ID NO: 1378321 - RNA, 24 nt, Human
ugggaggccgaggcggguggauca

SEQ ID NO: 1378322 - RNA, 24 nt, Human
ugggaggcugagggaggagaauca

SEQ ID NO: 1378323 - RNA, 21 nt, Human
ugucagcugcgcucagcucuu

SEQ ID NO: 1378324 - RNA, 24 nt, Human
uguccuuauaccugaaaacagcuu

SEQ ID NO: 1378325 - RNA, 24 nt, Human
uuauauauagauuuauaggggucu

SEQ ID NO: 1378326 - RNA, 25 nt, Human
uucaaaccucugaugacuuccaacc

SEQ ID NO: 1378327 - RNA, 19 nt, Human
uugaaaaauuuaaggagaa

SEQ ID NO: 1378328 - RNA, 21 nt, Human
uugaaaaauuuaaggagaacu

SEQ ID NO: 1378329 - RNA, 20 nt, Human
uugcaaagcagaaaaaaaaa

SEQ ID NO: 1378330 - RNA, 20 nt, Human
uugcaauggugagacagcuc

SEQ ID NO: 1378331 - RNA, 19 nt, Human
uugcagugaguugagaucu

SEQ ID NO: 1378332 - RNA, 22 nt, Human
uugcagugaguugagaucucac

SEQ ID NO: 1378333 - RNA, 25 nt, Human
uugggaggccgaggcggguggauca

SEQ ID NO: 1378334 - RNA, 25 nt, Human
uugggaggcugagggaggagaauca

SEQ ID NO: 1378335 - RNA, 20 nt, Human
uuuaaggagaacuucugagg

SEQ ID NO: 1378336 - RNA, 19 nt, Human
uuugauaaaauccaaguuc

SEQ ID NO: 1378337 - RNA, 21 nt, Human
aaaucccaagugucaggcccc

SEQ ID NO: 1378338 - RNA, 21 nt, Human
aaccccaacccacugccccuc

SEQ ID NO: 1378339 - RNA, 19 nt, Human
aagaggaggugcccaggac

SEQ ID NO: 1378340 - RNA, 23 nt, Human
aaggccccuccaguagccacacu

SEQ ID NO: 1378341 - RNA, 23 nt, Human
aaggggcaggagggaggcaaaga

SEQ ID NO: 1378342 - RNA, 27 nt, Human
aagugucaggcccccggaguccaucac

SEQ ID NO: 1378343 - RNA, 21 nt, Human
acccaggaacagccccucaac

SEQ ID NO: 1378344 - RNA, 19 nt, Human
acugccccucuuuggcagc

SEQ ID NO: 1378345 - RNA, 23 nt, Human
acugcgagcccggggucucagcu

SEQ ID NO: 1378346 - RNA, 20 nt, Human
agaaaaaggcaccaaggaca

SEQ ID NO: 1378347 - RNA, 19 nt, Human
agacccagggcagaggcga

SEQ ID NO: 1378348 - RNA, 18 nt, Human
agacccagggucuccagg

SEQ ID NO: 1378349 - RNA, 19 nt, Human
agcaggaaaggggcaggag

SEQ ID NO: 1378350 - RNA, 18 nt, Human
aggagggaggcaaagagg

SEQ ID NO: 1378351 - RNA, 20 nt, Human
aggcaaagaggaggugcccg

SEQ ID NO: 1378352 - RNA, 23 nt, Human
aggcaccacauggggcggcagua

SEQ ID NO: 1378353 - RNA, 23 nt, Human
aggcagccaggggccagcuccag

SEQ ID NO: 1378354 - RNA, 18 nt, Human
aggccccagcccacucag

SEQ ID NO: 1378355 - RNA, 23 nt, Human
aggggcaggagggaggcaaagag

SEQ ID NO: 1378356 - RNA, 20 nt, Human
aguaaaaacaaccccaaccc

SEQ ID NO: 1378357 - RNA, 19 nt, Human
aucccacccucaggaccua

SEQ ID NO: 1378358 - RNA, 21 nt, Human
caaacccccaccccuacccag

SEQ ID NO: 1378359 - RNA, 23 nt, Human
caaaucccaagugucaggccccc

SEQ ID NO: 1378360 - RNA, 19 nt, Human
caagacgcccaccagaggc

SEQ ID NO: 1378361 - RNA, 19 nt, Human
caagcccaggggcuuuggg

SEQ ID NO: 1378362 - RNA, 23 nt, Human
caagugucaggcccccggagucc

SEQ ID NO: 1378363 - RNA, 19 nt, Human
caccccacccaggaacagc

SEQ ID NO: 1378364 - RNA, 18 nt, Human
caccucaaggccccagcc

SEQ ID NO: 1378365 - RNA, 22 nt, Human
caccucugccucaaacagccaa

SEQ ID NO: 1378366 - RNA, 22 nt, Human
caccucugccucaaacagccaa

SEQ ID NO: 1378367 - RNA, 25 nt, Human
caccucugccucaaacagccaagcc

SEQ ID NO: 1378368 - RNA, 18 nt, Human
cacugccccucuuuggca

SEQ ID NO: 1378369 - RNA, 22 nt, Human
cacugccccucuuuggcagccc

SEQ ID NO: 1378370 - RNA, 21 nt, Human
cagaaaaaggcaccaaggaca

SEQ ID NO: 1378371 - RNA, 23 nt, Human
cagaaaaaggcaccaaggacagg

SEQ ID NO: 1378372 - RNA, 23 nt, Human
cagaggcuugaccacagggggcg

SEQ ID NO: 1378373 - RNA, 19 nt, Human
cagcagugcccucuucucc

SEQ ID NO: 1378374 - RNA, 19 nt, Human
cagccaccaggaagcccca

SEQ ID NO: 1378375 - RNA, 18 nt, Human
cagccacccccuucccug

SEQ ID NO: 1378376 - RNA, 21 nt, Human
caggggcuuuggggccgcagg

SEQ ID NO: 1378377 - RNA, 20 nt, Human
caugaggauugcuuuuaacc

SEQ ID NO: 1378378 - RNA, 22 nt, Human
ccaaaaguccucagccuucugc

SEQ ID NO: 1378379 - RNA, 23 nt, Human
ccaacccacugccccucuuuggc

SEQ ID NO: 1378380 - RNA, 22 nt, Human
ccacagcagugcccucuucucc

SEQ ID NO: 1378381 - RNA, 19 nt, Human
ccacugccccucuuuggca

SEQ ID NO: 1378382 - RNA, 19 nt, Human
ccagagaaguaaggcaaau

SEQ ID NO: 1378383 - RNA, 23 nt, Human
ccaguagccacaccugugucagg

SEQ ID NO: 1378384 - RNA, 24 nt, Human
cccacaaaugagggcgcucugacc

SEQ ID NO: 1378385 - RNA, 21 nt, Human
cccacaccacagcagugcccu

SEQ ID NO: 1378386 - RNA, 23 nt, Human
cccaccccuacccaggagucuga

SEQ ID NO: 1378387 - RNA, 19 nt, Human
cccagccacccccuucccu

SEQ ID NO: 1378388 - RNA, 23 nt, Human
cccauugccaccccacccaggaa

SEQ ID NO: 1378389 - RNA, 20 nt, Human
ccccaacccacugccccucu

SEQ ID NO: 1378390 - RNA, 23 nt, Human
ccccaacccacugccccucuuug

SEQ ID NO: 1378391 - RNA, 20 nt, Human
ccccaggacugcucccacac

SEQ ID NO: 1378392 - RNA, 21 nt, Human
ccccaggacugcucccacacc

SEQ ID NO: 1378393 - RNA, 18 nt, Human
cccccuccccuugaacca

SEQ ID NO: 1378394 - RNA, 23 nt, Human
ccccggaguccaucaccucugcc

SEQ ID NO: 1378395 - RNA, 22 nt, Human
ccccgugcgggugcggccuccu

SEQ ID NO: 1378396 - RNA, 23 nt, Human
cccuaggggaguggguagccugg

SEQ ID NO: 1378397 - RNA, 19 nt, Human
cccucaggaccuacccagg

SEQ ID NO: 1378398 - RNA, 22 nt, Human
cccucaggaccuacccaggguc

SEQ ID NO: 1378399 - RNA, 21 nt, Human
cccugcccuguggcuuugcgg

SEQ ID NO: 1378400 - RNA, 18 nt, Human
cccugcugccuucaccug

SEQ ID NO: 1378401 - RNA, 21 nt, Human
cccuggccaugaagccccgcc

SEQ ID NO: 1378402 - RNA, 20 nt, Human
ccgcagcgcccagucccgga

SEQ ID NO: 1378403 - RNA, 18 nt, Human
ccgcagguaugaaggccc

SEQ ID NO: 1378404 - RNA, 22 nt, Human
ccgugcgggugcggccucucuu

SEQ ID NO: 1378405 - RNA, 18 nt, Human
ccucaaacagccaagccc

SEQ ID NO: 1378406 - RNA, 23 nt, Human
ccucaaggccccagcccacucag

SEQ ID NO: 1378407 - RNA, 25 nt, Human
ccuccaggcagccaggggccagcuc

SEQ ID NO: 1378408 - RNA, 23 nt, Human
ccuccaguagccacaccuguguc

SEQ ID NO: 1378409 - RNA, 20 nt, Human
ccucccauugccaccccacc

SEQ ID NO: 1378410 - RNA, 23 nt, Human
ccucucuucucggccggcccugg

SEQ ID NO: 1378411 - RNA, 22 nt, Human
ccucugccucaaacagccaagc

SEQ ID NO: 1378412 - RNA, 20 nt, Human
ccuggccaugaagccccgcc

SEQ ID NO: 1378413 - RNA, 19 nt, Human
ccuggcucccggccauggc

SEQ ID NO: 1378414 - RNA, 22 nt, Human
ccuguggcugccuccuggcagg

SEQ ID NO: 1378415 - RNA, 26 nt, Human
ccugugucagggcugugcccuggggc

SEQ ID NO: 1378416 - RNA, 25 nt, Human
ccuucugcagacccagggcagaggc

SEQ ID NO: 1378417 - RNA, 20 nt, Human
cggaacucgaaauucauggg

SEQ ID NO: 1378418 - RNA, 20 nt, Human
cggcaguaacacugcuggca

SEQ ID NO: 1378419 - RNA, 24 nt, Human
cggccgcucgcggggcgcucuggg

SEQ ID NO: 1378420 - RNA, 22 nt, Human
cucaaacccccaccccuaccca

SEQ ID NO: 1378421 - RNA, 26 nt, Human
cucaaacccccaccccuacccaggag

SEQ ID NO: 1378422 - RNA, 24 nt, Human
cucaacucaaacccccaccccuac

SEQ ID NO: 1378423 - RNA, 21 nt, Human
cuccaggacagggcaggagaa

SEQ ID NO: 1378424 - RNA, 24 nt, Human
cucccggccauggccccugcuuug

SEQ ID NO: 1378425 - RNA, 22 nt, Human
cucgccuguggcugccuccugg

SEQ ID NO: 1378426 - RNA, 22 nt, Human
cucgcggggcgcucugggagau

SEQ ID NO: 1378427 - RNA, 19 nt, Human
cucucuucucggccggccc

SEQ ID NO: 1378428 - RNA, 21 nt, Human
cucuucuccaucccacccuca

SEQ ID NO: 1378429 - RNA, 22 nt, Human
cugggguagacccagggucucc

SEQ ID NO: 1378430 - RNA, 24 nt, Human
cuuaggccugagcgaggcccuggc

SEQ ID NO: 1378431 - RNA, 18 nt, Human
cuucucggccggcccugg

SEQ ID NO: 1378432 - RNA, 20 nt, Human
gaccucggccuucccuggac

SEQ ID NO: 1378433 - RNA, 21 nt, Human
gaccuguccucccauugccac

SEQ ID NO: 1378434 - RNA, 24 nt, Human
gaccuguccucccauugccacccc

SEQ ID NO: 1378435 - RNA, 22 nt, Human
gagaaacccggaggggcagccc

SEQ ID NO: 1378436 - RNA, 23 nt, Human
gagcacagguggggaaacuuagg

SEQ ID NO: 1378437 - RNA, 18 nt, Human
gauugcuuuuaaccaaaa

SEQ ID NO: 1378438 - RNA, 19 nt, Human
gcacacauccaggaugcag

SEQ ID NO: 1378439 - RNA, 23 nt, Human
gcacucgccuguggcugccuccu

SEQ ID NO: 1378440 - RNA, 21 nt, Human
gcaggagggaggcaaagagga

SEQ ID NO: 1378441 - RNA, 23 nt, Human
gccagccaggaggcccagccacc

SEQ ID NO: 1378442 - RNA, 21 nt, Human
gccccaggacugcucccacac

SEQ ID NO: 1378443 - RNA, 21 nt, Human
gcccuccacuccggaaacgga

SEQ ID NO: 1378444 - RNA, 19 nt, Human
gcccucuucuccaucccac

SEQ ID NO: 1378445 - RNA, 20 nt, Human
gcccucuucuccaucccacc

SEQ ID NO: 1378446 - RNA, 23 nt, Human
gcgaggcccuggccaugaagccc

SEQ ID NO: 1378447 - RNA, 26 nt, Human
gcuacaaucgguuugucuuuauaaaa

SEQ ID NO: 1378448 - RNA, 19 nt, Human
gcucugggagaugcagucc

SEQ ID NO: 1378449 - RNA, 20 nt, Human
ggaagccucccaaaucccaa

SEQ ID NO: 1378450 - RNA, 19 nt, Human
ggaguccaucaccucugcc

SEQ ID NO: 1378451 - RNA, 23 nt, Human
ggcaccaaggacaggaugagaaa

SEQ ID NO: 1378452 - RNA, 20 nt, Human
ggccaugaagccccgcccag

SEQ ID NO: 1378453 - RNA, 19 nt, Human
ggcgacugcgagcccgggg

SEQ ID NO: 1378454 - RNA, 24 nt, Human
gggcagaaaaaggcaccaaggaca

SEQ ID NO: 1378455 - RNA, 26 nt, Human
gggcaggagaaugcgguccaggucug

SEQ ID NO: 1378456 - RNA, 22 nt, Human
gggcagggcacgcggcuggcca

SEQ ID NO: 1378457 - RNA, 23 nt, Human
gggcugugcccuggggccuggcc

SEQ ID NO: 1378458 - RNA, 21 nt, Human
guaaaaacaaccccaacccac

SEQ ID NO: 1378459 - RNA, 22 nt, Human
guaugaaggccccuccaguagc

SEQ ID NO: 1378460 - RNA, 21 nt, Human
guccaucaccucugccucaaa

SEQ ID NO: 1378461 - RNA, 22 nt, Human
guggcuuugcggggagacacag

SEQ ID NO: 1378462 - RNA, 22 nt, Human
uaaaaacaaccccaacccacug

SEQ ID NO: 1378463 - RNA, 27 nt, Human
uaaggcaaauggcccagaugacgacca

SEQ ID NO: 1378464 - RNA, 23 nt, Human
uaaguagagcccuuugccagcca

SEQ ID NO: 1378465 - RNA, 21 nt, Human
uaggaagccucccaaauccca

SEQ ID NO: 1378466 - RNA, 20 nt, Human
uaggggaguggguagccugg

SEQ ID NO: 1378467 - RNA, 22 nt, Human
ucaaacagccaagcccaggggc

SEQ ID NO: 1378468 - RNA, 18 nt, Human
ucaaagcuaggccuggcu

SEQ ID NO: 1378469 - RNA, 21 nt, Human
ucaacucaaacccccaccccu

SEQ ID NO: 1378470 - RNA, 23 nt, Human
ucacagccaccaggaagccccag

SEQ ID NO: 1378471 - RNA, 23 nt, Human
ucagccuucugcagacccagggc

SEQ ID NO: 1378472 - RNA, 19 nt, Human
uccacuccggaaacggaac

SEQ ID NO: 1378473 - RNA, 19 nt, Human
uccagagaaguaaggcaaa

SEQ ID NO: 1378474 - RNA, 23 nt, Human
uccaucaccucugccucaaacaa

SEQ ID NO: 1378475 - RNA, 24 nt, Human
ucccaaaucccaagugucaggccc

SEQ ID NO: 1378476 - RNA, 18 nt, Human
ucugcagacccagggcag

SEQ ID NO: 1378477 - RNA, 19 nt, Human
ucugcagacccagggcaga

SEQ ID NO: 1378478 - RNA, 22 nt, Human
ucugcagacccagggcagaggc

SEQ ID NO: 1378479 - RNA, 24 nt, Human
ugagccugggagacccuaggggag

SEQ ID NO: 1378480 - RNA, 21 nt, Human
ugcaggugaggcaccacaugg

SEQ ID NO: 1378481 - RNA, 24 nt, Human
ugccaccccacccaggaacagccc

SEQ ID NO: 1378482 - RNA, 25 nt, Human
ugcccuccacuccggaaacggaacc

SEQ ID NO: 1378483 - RNA, 19 nt, Human
uggcacucgccuguggcug

SEQ ID NO: 1378484 - RNA, 18 nt, Human
uggcagcccuugaaacuc

SEQ ID NO: 1378485 - RNA, 21 nt, Human
uggcccagaugacgaccaccu

SEQ ID NO: 1378486 - RNA, 21 nt, Human
uggcucccggccauggccccu

SEQ ID NO: 1378487 - RNA, 19 nt, Human
uggcugccaagcagggugg

SEQ ID NO: 1378488 - RNA, 21 nt, Human
ugggcuuguguucuggauguc

SEQ ID NO: 1378489 - RNA, 19 nt, Human
uggggcagggcacgcggcu

SEQ ID NO: 1378490 - RNA, 22 nt, Human
uggggccgcagguaugaaggcc

SEQ ID NO: 1378491 - RNA, 20 nt, Human
ugugucugugugugcaggau

SEQ ID NO: 1378492 - RNA, 21 nt, Human
uugaaccaucaggaacugggc

SEQ ID NO: 1378493 - RNA, 23 nt, Human
uuggggccgcagguaugaaggcc

SEQ ID NO: 1378494 - RNA, 24 nt, Human
uuuaaccaaaaguccucagccuuc

SEQ ID NO: 1378495 - RNA, 20 nt, Human
uuuuuuuuuuuuucacuuca

SEQ ID NO: 1378496 - RNA, 21 nt, Human
uuuuuuuuuuuuucacuucag

SEQ ID NO: 1378497 - RNA, 22 nt, Human
uuuuuuuuuuuuuuuuucacuu

SEQ ID NO: 1378498 - RNA, 20 nt, Human
gggcgguggggggcuggggc

SEQ ID NO: 1378499 - RNA, 23 nt, Human
gggggcgguggggggcuggggcg

SEQ ID NO: 1378500 - RNA, 24 nt, Human
ucuuuguagagagcgcagagcuug

SEQ ID NO: 1378501 - RNA, 21 nt, Human
ugggggcgguggggggcuggg

SEQ ID NO: 1378502 - RNA, 22 nt, Human
uggggggcuggggcgucugcgc

SEQ ID NO: 1378503 - RNA, 18 nt, Human
aagauggauucuuggugg

SEQ ID NO: 1378504 - RNA, 21 nt, Human
aagccuuggagcagugaagug

SEQ ID NO: 1378505 - RNA, 26 nt, Human
aagugucucuccaggauuuucuuucc

SEQ ID NO: 1378506 - RNA, 24 nt, Human
acaacgaaacuaacacagcauaag

SEQ ID NO: 1378507 - RNA, 23 nt, Human
agaggucugagggaagggaggca

SEQ ID NO: 1378508 - RNA, 19 nt, Human
agcagugaagugucucucc

SEQ ID NO: 1378509 - RNA, 18 nt, Human
aggaagggccucugggug

SEQ ID NO: 1378510 - RNA, 22 nt, Human
caaacccugggcuuggaauuca

SEQ ID NO: 1378511 - RNA, 18 nt, Human
cagggcccaagccagaag

SEQ ID NO: 1378512 - RNA, 23 nt, Human
ccaagccagaagagggauaagga

SEQ ID NO: 1378513 - RNA, 18 nt, Human
cccucaggaagggccucu

SEQ ID NO: 1378514 - RNA, 18 nt, Human
ccucuggguggccucugc

SEQ ID NO: 1378515 - RNA, 23 nt, Human
cucaggaagggccucuggguggg

SEQ ID NO: 1378516 - RNA, 20 nt, Human
cucccagggccagagcagca

SEQ ID NO: 1378517 - RNA, 21 nt, Human
cuggaguuagcaagcagcccc

SEQ ID NO: 1378518 - RNA, 20 nt, Human
gaaagacuuaggugucaggg

SEQ ID NO: 1378519 - RNA, 18 nt, Human
gaagagguggcgguccuc

SEQ ID NO: 1378520 - RNA, 18 nt, Human
gaauguggccggcccuca

SEQ ID NO: 1378521 - RNA, 19 nt, Human
ggcuuggaauucagcuccc

SEQ ID NO: 1378522 - RNA, 18 nt, Human
gggaauguggccggcccu

SEQ ID NO: 1378523 - RNA, 21 nt, Human
gggcccaagccagaagaggga

SEQ ID NO: 1378524 - RNA, 21 nt, Human
gucucuccaggauuuucuuuc

SEQ ID NO: 1378525 - RNA, 20 nt, Human
guggccucugcaucccuggc

SEQ ID NO: 1378526 - RNA, 20 nt, Human
uaaaccgugggaaagacuua

SEQ ID NO: 1378527 - RNA, 18 nt, Human
uaagcccucaagcuaggc

SEQ ID NO: 1378528 - RNA, 24 nt, Human
uaagcccucaagcuaggcaagaca

SEQ ID NO: 1378529 - RNA, 19 nt, Human
uaaggacuuaagcccucaa

SEQ ID NO: 1378530 - RNA, 22 nt, Human
ucagggcccaagccagaagagg

SEQ ID NO: 1378531 - RNA, 22 nt, Human
ucccagggccagagcagcaucu

SEQ ID NO: 1378532 - RNA, 24 nt, Human
uccuggaagaauguccuuucuacc

SEQ ID NO: 1378533 - RNA, 21 nt, Human
ucgcaagcacugggaagaggu

SEQ ID NO: 1378534 - RNA, 21 nt, Human
ucuacccaaucugcccaggag

SEQ ID NO: 1378535 - RNA, 25 nt, Human
ugagggaagggaggcaggcagcuua

SEQ ID NO: 1378536 - RNA, 23 nt, Human
ugagggagaggucugagggaagg

SEQ ID NO: 1378537 - RNA, 21 nt, Human
ugcccaggagggcgggaaugu

SEQ ID NO: 1378538 - RNA, 20 nt, Human
ugggcuuggaauucagcucc

SEQ ID NO: 1378539 - RNA, 18 nt, Human
ugucagggcccaagccag

SEQ ID NO: 1378540 - RNA, 23 nt, Human
ugucucaaaagccuuggagcagu

SEQ ID NO: 1378541 - RNA, 19 nt, Human
uuaaaaagacagaaaugcc

SEQ ID NO: 1378542 - RNA, 18 nt, Human
uucugacaacgaaacuaa

SEQ ID NO: 1378543 - RNA, 22 nt, Human
uuggaauucagcucccagggcc

SEQ ID NO: 1378544 - RNA, 21 nt, Human
aagauuccacuccacaagaua

SEQ ID NO: 1378545 - RNA, 21 nt, Human
aaucacuugcacccaaggcuu

SEQ ID NO: 1378546 - RNA, 19 nt, Human
agaguagaagcagacucac

SEQ ID NO: 1378547 - RNA, 19 nt, Human
agcuccucagcggcagccu

SEQ ID NO: 1378548 - RNA, 19 nt, Human
auggggcugccuuuugcca

SEQ ID NO: 1378549 - RNA, 21 nt, Human
caaaacucugucccuuacugu

SEQ ID NO: 1378550 - RNA, 24 nt, Human
caaaaguaacccucaaauguucga

SEQ ID NO: 1378551 - RNA, 22 nt, Human
cacuucucauccugugcuacug

SEQ ID NO: 1378552 - RNA, 19 nt, Human
cagcggcagccuguugcgc

SEQ ID NO: 1378553 - RNA, 21 nt, Human
caugaggaagauuccacucca

SEQ ID NO: 1378554 - RNA, 19 nt, Human
ccaaaaguaacccucaaau

SEQ ID NO: 1378555 - RNA, 19 nt, Human
ccccaccagcuccagcucc

SEQ ID NO: 1378556 - RNA, 21 nt, Human
ccccaccagcuccagcuccuc

SEQ ID NO: 1378557 - RNA, 21 nt, Human
ccugugcuacugacauucagg

SEQ ID NO: 1378558 - RNA, 18 nt, Human
cucacuccauggccaggc

SEQ ID NO: 1378559 - RNA, 20 nt, Human
cucacucuaugcaggaccac

SEQ ID NO: 1378560 - RNA, 23 nt, Human
cuguugcugaauagguuuguauu

SEQ ID NO: 1378561 - RNA, 18 nt, Human
gaaucacuugcacccaag

SEQ ID NO: 1378562 - RNA, 21 nt, Human
gcuccucagcggcagccuguu

SEQ ID NO: 1378563 - RNA, 18 nt, Human
ggacaaguggaccccaaa

SEQ ID NO: 1378564 - RNA, 23 nt, Human
ggacaaguggaccccaaaacucu

SEQ ID NO: 1378565 - RNA, 19 nt, Human
guaagacagagguuucgaa

SEQ ID NO: 1378566 - RNA, 33 nt, Human
gucccuuacuguugcucccgugaucucugauua

SEQ ID NO: 1378567 - RNA, 20 nt, Human
ucacuccauggccaggcucu

SEQ ID NO: 1378568 - RNA, 25 nt, Human
ucagaaacagcauauaccaccaaaa

SEQ ID NO: 1378569 - RNA, 22 nt, Human
ucagaacaccaagaaugcuuag

SEQ ID NO: 1378570 - RNA, 20 nt, Human
uccacaagauacagaaccca

SEQ ID NO: 1378571 - RNA, 21 nt, Human
uccacaagauacagaacccac

SEQ ID NO: 1378572 - RNA, 18 nt, Human
ucuaaagcagagucacuu

SEQ ID NO: 1378573 - RNA, 21 nt, Human
ugcaagauaaaaggcacaugu

SEQ ID NO: 1378574 - RNA, 19 nt, Human
ugcggcccaguccccacca

SEQ ID NO: 1378575 - RNA, 19 nt, Human
ugugcuguugcugaauagg

SEQ ID NO: 1378576 - RNA, 21 nt, Human
uucagaaacagcauauaccac

SEQ ID NO: 1378577 - RNA, 24 nt, Human
uuugccaccugggaaucacuugca

SEQ ID NO: 1378578 - RNA, 21 nt, Human
aaacacccaggagcccacccu

SEQ ID NO: 1378579 - RNA, 23 nt, Human
aaacacccaggagcccacccuuc

SEQ ID NO: 1378580 - RNA, 19 nt, Human
aaacacucagccccgaaga

SEQ ID NO: 1378581 - RNA, 21 nt, Human
aagcaaacacccaggagccca

SEQ ID NO: 1378582 - RNA, 28 nt, Human
aagcaaacacccaggagcccacccuuca

SEQ ID NO: 1378583 - RNA, 20 nt, Human
aagcagaaggaauccccccc

SEQ ID NO: 1378584 - RNA, 19 nt, Human
aaugcagacaccauucacc

SEQ ID NO: 1378585 - RNA, 22 nt, Human
acaacagcacagauccggcccg

SEQ ID NO: 1378586 - RNA, 20 nt, Human
acacaguccagccuccaucc

SEQ ID NO: 1378587 - RNA, 21 nt, Human
acacugcaacccacuuuggug

SEQ ID NO: 1378588 - RNA, 24 nt, Human
accgcaacuucuccugccuggcug

SEQ ID NO: 1378589 - RNA, 24 nt, Human
accguggagccccuggacagccuc

SEQ ID NO: 1378590 - RNA, 23 nt, Human
acucucccucuucccugaaguuc

SEQ ID NO: 1378591 - RNA, 23 nt, Human
agaggagacagacccaaacuuuu

SEQ ID NO: 1378592 - RNA, 23 nt, Human
agccccuggacagccucacccuc

SEQ ID NO: 1378593 - RNA, 21 nt, Human
agccuccaaggcaggucaucc

SEQ ID NO: 1378594 - RNA, 18 nt, Human
agcugguagccugagccc

SEQ ID NO: 1378595 - RNA, 22 nt, Human
aggaagcaguggggcagaggcg

SEQ ID NO: 1378596 - RNA, 23 nt, Human
aggaagcaguggggcagaggcgg

SEQ ID NO: 1378597 - RNA, 21 nt, Human
aggagaagagggccuggcuga

SEQ ID NO: 1378598 - RNA, 18 nt, Human
aggcaggaagcagugggg

SEQ ID NO: 1378599 - RNA, 23 nt, Human
aggcaggaagcaguggggcagag

SEQ ID NO: 1378600 - RNA, 18 nt, Human
aggcugcugggacugcac

SEQ ID NO: 1378601 - RNA, 21 nt, Human
agggaggggagccaccauggg

SEQ ID NO: 1378602 - RNA, 21 nt, Human
agugucuccuccugggauaac

SEQ ID NO: 1378603 - RNA, 18 nt, Human
augucuguaaaacuacca

SEQ ID NO: 1378604 - RNA, 28 nt, Human
auugcuacugagggagggugggggaaac

SEQ ID NO: 1378605 - RNA, 24 nt, Human
auuuuaaugcagacaccauucacc

SEQ ID NO: 1378606 - RNA, 23 nt, Human
caacagcacagauccggcccguc

SEQ ID NO: 1378607 - RNA, 19 nt, Human
caacagcacggcugacaga

SEQ ID NO: 1378608 - RNA, 24 nt, Human
caacagcacggcugacagagagga

SEQ ID NO: 1378609 - RNA, 20 nt, Human
caacaggcccccaucuggcc

SEQ ID NO: 1378610 - RNA, 18 nt, Human
caacccacuuugguggcu

SEQ ID NO: 1378611 - RNA, 23 nt, Human
caaguccccagcuuggaccucaa

SEQ ID NO: 1378612 - RNA, 18 nt, Human
cacaguccagccuccauc

SEQ ID NO: 1378613 - RNA, 24 nt, Human
cacaguccagccuccauccucaac

SEQ ID NO: 1378614 - RNA, 24 nt, Human
cacccaggagcccacccuucaucc

SEQ ID NO: 1378615 - RNA, 18 nt, Human
cacccuucauccugaggc

SEQ ID NO: 1378616 - RNA, 18 nt, Human
caccgcaacuucuccugc

SEQ ID NO: 1378617 - RNA, 22 nt, Human
cacucugggccccuccagccac

SEQ ID NO: 1378618 - RNA, 20 nt, Human
cagccccgaagauguuggag

SEQ ID NO: 1378619 - RNA, 21 nt, Human
caggagauggcccuggccagg

SEQ ID NO: 1378620 - RNA, 20 nt, Human
caguggggcagaggcgggcu

SEQ ID NO: 1378621 - RNA, 19 nt, Human
cauagcaaccaugaguggc

SEQ ID NO: 1378622 - RNA, 19 nt, Human
caugucuguaaaacuacca

SEQ ID NO: 1378623 - RNA, 23 nt, Human
ccauucaccacucaucucugcaa

SEQ ID NO: 1378624 - RNA, 19 nt, Human
cccaccguggagccccugg

SEQ ID NO: 1378625 - RNA, 19 nt, Human
ccccucccuccccagagcc

SEQ ID NO: 1378626 - RNA, 19 nt, Human
ccccugcagagccuccaag

SEQ ID NO: 1378627 - RNA, 19 nt, Human
ccccuggacagccucaccc

SEQ ID NO: 1378628 - RNA, 19 nt, Human
cccgaguagcucauugcua

SEQ ID NO: 1378629 - RNA, 22 nt, Human
cccuccccacccucuccuucac

SEQ ID NO: 1378630 - RNA, 23 nt, Human
cccuccccacccucuccuucaca

SEQ ID NO: 1378631 - RNA, 24 nt, Human
cccuccccacccucuccuucacag

SEQ ID NO: 1378632 - RNA, 23 nt, Human
cccugugcccacagugucuccuc

SEQ ID NO: 1378633 - RNA, 18 nt, Human
ccggccaggccaccuccu

SEQ ID NO: 1378634 - RNA, 19 nt, Human
ccuccuccccaaccgugga

SEQ ID NO: 1378635 - RNA, 18 nt, Human
ccugacacugcaacccac

SEQ ID NO: 1378636 - RNA, 21 nt, Human
ccugcagagccuccaaggcag

SEQ ID NO: 1378637 - RNA, 26 nt, Human
ccuggacuuagcccugugccgguucc

SEQ ID NO: 1378638 - RNA, 21 nt, Human
ccuggccacagcaggacaaag

SEQ ID NO: 1378639 - RNA, 26 nt, Human
ccuggccccaggagaccucaggccac

SEQ ID NO: 1378640 - RNA, 18 nt, Human
ccuugcccccucccuccc

SEQ ID NO: 1378641 - RNA, 19 nt, Human
cgaagauguuggagaucua

SEQ ID NO: 1378642 - RNA, 26 nt, Human
cgaauacaaacaccuggacuuagccc

SEQ ID NO: 1378643 - RNA, 18 nt, Human
cgacaagagaggugcagg

SEQ ID NO: 1378644 - RNA, 18 nt, Human
cgccagcagcggaugggc

SEQ ID NO: 1378645 - RNA, 20 nt, Human
cggccaggccaccuccuccc

SEQ ID NO: 1378646 - RNA, 23 nt, Human
cggccaggccaccuccuccccaa

SEQ ID NO: 1378647 - RNA, 19 nt, Human
cggcuuggaggaggcugcc

SEQ ID NO: 1378648 - RNA, 24 nt, Human
cgggaaggcagccccugcuccggu

SEQ ID NO: 1378649 - RNA, 21 nt, Human
cuaccacacaguccagccucc

SEQ ID NO: 1378650 - RNA, 19 nt, Human
cucagcucugcccaagaag

SEQ ID NO: 1378651 - RNA, 19 nt, Human
cucauugcuacugagggag

SEQ ID NO: 1378652 - RNA, 23 nt, Human
cuccccgaccacucugggccccc

SEQ ID NO: 1378653 - RNA, 22 nt, Human
cucccuagaugccucccucccc

SEQ ID NO: 1378654 - RNA, 26 nt, Human
cucccucuucccugaaguucuuucca

SEQ ID NO: 1378655 - RNA, 23 nt, Human
cuccuuuguccccugcagagccu

SEQ ID NO: 1378656 - RNA, 21 nt, Human
cucggccaccaucaagcccca

SEQ ID NO: 1378657 - RNA, 19 nt, Human
cucugcacuggagccggcc

SEQ ID NO: 1378658 - RNA, 19 nt, Human
cugaaggacugugacaggc

SEQ ID NO: 1378659 - RNA, 18 nt, Human
cugacacugcaacccacu

SEQ ID NO: 1378660 - RNA, 22 nt, Human
cugcacccccauccugaccaga

SEQ ID NO: 1378661 - RNA, 18 nt, Human
cugcccccacugaggucc

SEQ ID NO: 1378662 - RNA, 19 nt, Human
cugcccccacugagguccc

SEQ ID NO: 1378663 - RNA, 21 nt, Human
cuggacuuagcccugugccca

SEQ ID NO: 1378664 - RNA, 19 nt, Human
cuggccacagcaggacaaa

SEQ ID NO: 1378665 - RNA, 19 nt, Human
cuggccuuggcuccccucc

SEQ ID NO: 1378666 - RNA, 20 nt, Human
cugggaugaggggugggggg

SEQ ID NO: 1378667 - RNA, 22 nt, Human
cugggggucuggguugggggug

SEQ ID NO: 1378668 - RNA, 23 nt, Human
cugggggucuggguugggggugg

SEQ ID NO: 1378669 - RNA, 20 nt, Human
cuguccugcucugcuucauc

SEQ ID NO: 1378670 - RNA, 19 nt, Human
cugugcccacagugucucc

SEQ ID NO: 1378671 - RNA, 25 nt, Human
cuugacggcucucccuggccuuggc

SEQ ID NO: 1378672 - RNA, 23 nt, Human
cuuguagacaccuggucaccgga

SEQ ID NO: 1378673 - RNA, 21 nt, Human
cuuugguggcugugggcaagu

SEQ ID NO: 1378674 - RNA, 19 nt, Human
gaaacacacccuggcccag

SEQ ID NO: 1378675 - RNA, 21 nt, Human
gaaguucacucagcucugccc

SEQ ID NO: 1378676 - RNA, 22 nt, Human
gacaccauucaccacucaucuc

SEQ ID NO: 1378677 - RNA, 24 nt, Human
gacaggagauggcccuggccaggg

SEQ ID NO: 1378678 - RNA, 22 nt, Human
gacucugcucaggggcgcugcc

SEQ ID NO: 1378679 - RNA, 23 nt, Human
gagcgggcggcggggucuggggg

SEQ ID NO: 1378680 - RNA, 23 nt, Human
gaggaggcugccccaggccuucc

SEQ ID NO: 1378681 - RNA, 20 nt, Human
gagguccagcccuggcugaa

SEQ ID NO: 1378682 - RNA, 20 nt, Human
gauggcccuggccaggggga

SEQ ID NO: 1378683 - RNA, 22 nt, Human
gcaacaucuuucacaaacacuc

SEQ ID NO: 1378684 - RNA, 21 nt, Human
gcacuggagccggccaggcca

SEQ ID NO: 1378685 - RNA, 19 nt, Human
gcaggaggcggcuccgggg

SEQ ID NO: 1378686 - RNA, 19 nt, Human
gccaccgcaacuucuccug

SEQ ID NO: 1378687 - RNA, 20 nt, Human
gccaggccaccuccucccca

SEQ ID NO: 1378688 - RNA, 22 nt, Human
gccagggaggggagccaccaug

SEQ ID NO: 1378689 - RNA, 19 nt, Human
gcccgaauacaaacaccug

SEQ ID NO: 1378690 - RNA, 18 nt, Human
gccucccuccccacccuc

SEQ ID NO: 1378691 - RNA, 19 nt, Human
gccuggcugagguugaggg

SEQ ID NO: 1378692 - RNA, 18 nt, Human
gcgggcggcggggucugg

SEQ ID NO: 1378693 - RNA, 23 nt, Human
gcucugcuucaucuucggccagc

SEQ ID NO: 1378694 - RNA, 20 nt, Human
gcugaaggacugugacaggc

SEQ ID NO: 1378695 - RNA, 21 nt, Human
gcugcugggacugcaccccca

SEQ ID NO: 1378696 - RNA, 23 nt, Human
ggcaccggggagucgacaagaga

SEQ ID NO: 1378697 - RNA, 20 nt, Human
ggcucucccuggccuuggcu

SEQ ID NO: 1378698 - RNA, 25 nt, Human
gggcagaggcgggcugacguggcuu

SEQ ID NO: 1378699 - RNA, 18 nt, Human
gggccccuccagccaccu

SEQ ID NO: 1378700 - RNA, 22 nt, Human
ggucugggggucuggguugggg

SEQ ID NO: 1378701 - RNA, 20 nt, Human
ggucuggguuggggguggac

SEQ ID NO: 1378702 - RNA, 22 nt, Human
ggugcaggaggcggcuccgggg

SEQ ID NO: 1378703 - RNA, 27 nt, Human
gugcccaccguggagccccuggacagc

SEQ ID NO: 1378704 - RNA, 23 nt, Human
uaagacccuugcccccucccucc

SEQ ID NO: 1378705 - RNA, 19 nt, Human
uagcccgaauacaaacacc

SEQ ID NO: 1378706 - RNA, 22 nt, Human
uagcccgaauacaaacaccugg

SEQ ID NO: 1378707 - RNA, 26 nt, Human
ucacgguggugucgguguugcugucc

SEQ ID NO: 1378708 - RNA, 25 nt, Human
uccaaguccccagcuuggaccucaa

SEQ ID NO: 1378709 - RNA, 21 nt, Human
uccacaaugagaaguuuggcc

SEQ ID NO: 1378710 - RNA, 21 nt, Human
uccaggccacgguguccagca

SEQ ID NO: 1378711 - RNA, 23 nt, Human
ucccagcccaugcaacaggcccc

SEQ ID NO: 1378712 - RNA, 19 nt, Human
ucccauggcugcugacaag

SEQ ID NO: 1378713 - RNA, 19 nt, Human
uccccagagccugugucgg

SEQ ID NO: 1378714 - RNA, 19 nt, Human
uccccagagcucugcugcu

SEQ ID NO: 1378715 - RNA, 22 nt, Human
ucccccccuccccucuugcucc

SEQ ID NO: 1378716 - RNA, 19 nt, Human
ucccccugcuccaggcagg

SEQ ID NO: 1378717 - RNA, 21 nt, Human
uccccgaccacucugggcccc

SEQ ID NO: 1378718 - RNA, 24 nt, Human
ucccuagaugccucccuccccacc

SEQ ID NO: 1378719 - RNA, 22 nt, Human
ucccugaaguucuuuccaaguc

SEQ ID NO: 1378720 - RNA, 22 nt, Human
uccucggccaccaucaagcccc

SEQ ID NO: 1378721 - RNA, 20 nt, Human
uccuuuguccccugcagagc

SEQ ID NO: 1378722 - RNA, 19 nt, Human
ucgacaagagaggugcagg

SEQ ID NO: 1378723 - RNA, 23 nt, Human
ucuugcuccauuacuaggcugga

SEQ ID NO: 1378724 - RNA, 23 nt, Human
ucuuucacaaacacucagccccg

SEQ ID NO: 1378725 - RNA, 20 nt, Human
ugaccuugacggcucucccu

SEQ ID NO: 1378726 - RNA, 19 nt, Human
ugacggcucucccuggccu

SEQ ID NO: 1378727 - RNA, 24 nt, Human
ugagggagagagggugggggcucu

SEQ ID NO: 1378728 - RNA, 23 nt, Human
ugaggggggauccguggauggag

SEQ ID NO: 1378729 - RNA, 21 nt, Human
ugagggguggggggcccagcg

SEQ ID NO: 1378730 - RNA, 21 nt, Human
ugagugcagggugcccaccgu

SEQ ID NO: 1378731 - RNA, 22 nt, Human
ugcccccucccuccccagagcc

SEQ ID NO: 1378732 - RNA, 26 nt, Human
ugccucccuccccacccucuccuuca

SEQ ID NO: 1378733 - RNA, 21 nt, Human
ugcucugcuucaucuucggcc

SEQ ID NO: 1378734 - RNA, 19 nt, Human
uggaacaccauggugacag

SEQ ID NO: 1378735 - RNA, 19 nt, Human
uggaccucaacugcuccag

SEQ ID NO: 1378736 - RNA, 27 nt, Human
uggcaacaucuuucacaaacacucagc

SEQ ID NO: 1378737 - RNA, 22 nt, Human
uggcaugaaguucacucagcuc

SEQ ID NO: 1378738 - RNA, 23 nt, Human
uggcaugaaguucacucagcucu

SEQ ID NO: 1378739 - RNA, 20 nt, Human
uggccaccgcaacuucuccu

SEQ ID NO: 1378740 - RNA, 18 nt, Human
uggccagggggaggcugc

SEQ ID NO: 1378741 - RNA, 22 nt, Human
uggcugaaggacugugacaggc

SEQ ID NO: 1378742 - RNA, 24 nt, Human
uggcugugggcaaguccuucacca

SEQ ID NO: 1378743 - RNA, 27 nt, Human
ugggaagcaaacacccaggagcccagu

SEQ ID NO: 1378744 - RNA, 18 nt, Human
ugggaugagggguggggg

SEQ ID NO: 1378745 - RNA, 18 nt, Human
uggggugacugcuggaug

SEQ ID NO: 1378746 - RNA, 21 nt, Human
ugguaacugggaucacaggac

SEQ ID NO: 1378747 - RNA, 25 nt, Human
ugguagccugagcccugggccaccu

SEQ ID NO: 1378748 - RNA, 18 nt, Human
uggugaggggggauccgu

SEQ ID NO: 1378749 - RNA, 21 nt, Human
uggugucgguguugcuguccc

SEQ ID NO: 1378750 - RNA, 23 nt, Human
uucauuucugaaggagaggagac

SEQ ID NO: 1378751 - RNA, 22 nt, Human
uuccccaggagaagagggccug

SEQ ID NO: 1378752 - RNA, 20 nt, Human
uucgugacaucuguccugcu

SEQ ID NO: 1378753 - RNA, 24 nt, Human
uuggagaucuauggugagggggga

SEQ ID NO: 1378754 - RNA, 25 nt, Human
uuggcugggaccaugccacccucca

SEQ ID NO: 1378755 - RNA, 18 nt, Human
uuuguccccugcagagcc

SEQ ID NO: 1378756 - RNA, 21 nt, Human
uuuguccccugcagagccucc

SEQ ID NO: 1378757 - RNA, 22 nt, Human
aaaaaaaaaaaguccucaaagg

SEQ ID NO: 1378758 - RNA, 23 nt, Human
aaaucaaggugaaacauaccccu

SEQ ID NO: 1378759 - RNA, 20 nt, Human
aacacugaaagaaccgggcc

SEQ ID NO: 1378760 - RNA, 18 nt, Human
aagaaccgggccaaaauc

SEQ ID NO: 1378761 - RNA, 25 nt, Human
aaucagcauuguuuuaaagagguuu

SEQ ID NO: 1378762 - RNA, 22 nt, Human
acacugaaagaaccgggccaaa

SEQ ID NO: 1378763 - RNA, 19 nt, Human
acccauuuaaaaacaggau

SEQ ID NO: 1378764 - RNA, 19 nt, Human
acggaacacugaaagaacc

SEQ ID NO: 1378765 - RNA, 18 nt, Human
agagguuuuuauuggagg

SEQ ID NO: 1378766 - RNA, 22 nt, Human
agauaauacccucaaacaaacc

SEQ ID NO: 1378767 - RNA, 19 nt, Human
auacccucaaacaaaccca

SEQ ID NO: 1378768 - RNA, 23 nt, Human
auuccuguuuuucucuuguucac

SEQ ID NO: 1378769 - RNA, 24 nt, Human
caaacaaacccauuuaaaaacagg

SEQ ID NO: 1378770 - RNA, 22 nt, Human
caaaccuauuaauuuacuaaaa

SEQ ID NO: 1378771 - RNA, 22 nt, Human
caaacuaauaagaaaaucagca

SEQ ID NO: 1378772 - RNA, 19 nt, Human
caaggugaaacauaccccu

SEQ ID NO: 1378773 - RNA, 21 nt, Human
cacugaaagaaccgggccaaa

SEQ ID NO: 1378774 - RNA, 20 nt, Human
cccaggagaagugaaaugag

SEQ ID NO: 1378775 - RNA, 19 nt, Human
cucaauaccauauuagcuc

SEQ ID NO: 1378776 - RNA, 23 nt, Human
cuuuuuggaauuucugauaaaua

SEQ ID NO: 1378777 - RNA, 24 nt, Human
gaacacugaaagaaccgggccaaa

SEQ ID NO: 1378778 - RNA, 19 nt, Human
guaaaauguuauacuuuca

SEQ ID NO: 1378779 - RNA, 20 nt, Human
guucuucacauaaauuccag

SEQ ID NO: 1378780 - RNA, 19 nt, Human
uaaaaacacuccaaccaug

SEQ ID NO: 1378781 - RNA, 19 nt, Human
uaaaaaggguaaacggaac

SEQ ID NO: 1378782 - RNA, 22 nt, Human
uaaacggaacacugaaagaacc

SEQ ID NO: 1378783 - RNA, 24 nt, Human
uaccagaagauaauacccucaaac

SEQ ID NO: 1378784 - RNA, 19 nt, Human
uacccucaaacaaacccau

SEQ ID NO: 1378785 - RNA, 23 nt, Human
uacccucaaacaaacccauuuaa

SEQ ID NO: 1378786 - RNA, 19 nt, Human
uagcucaaaagaauaccag

SEQ ID NO: 1378787 - RNA, 21 nt, Human
uauugaguaucauuuuccauu

SEQ ID NO: 1378788 - RNA, 22 nt, Human
uauuuauuuacacauuuacaua

SEQ ID NO: 1378789 - RNA, 23 nt, Human
ucccaggagaagugaaaugaguu

SEQ ID NO: 1378790 - RNA, 21 nt, Human
uccuguuuuucucuuguucac

SEQ ID NO: 1378791 - RNA, 19 nt, Human
ucuauagaaaugcuucugu

SEQ ID NO: 1378792 - RNA, 20 nt, Human
ucuauagaaaugcuucuguu

SEQ ID NO: 1378793 - RNA, 22 nt, Human
ucugaucuaaaaacacuccaac

SEQ ID NO: 1378794 - RNA, 24 nt, Human
ugaauucaaaaaucagcauuguuu

SEQ ID NO: 1378795 - RNA, 23 nt, Human
ugaucuaaaaacacuccaaccau

SEQ ID NO: 1378796 - RNA, 21 nt, Human
uguguuuauauauaagugugu

SEQ ID NO: 1378797 - RNA, 23 nt, Human
uucaaauaacaaaacgcagguug

SEQ ID NO: 1378798 - RNA, 22 nt, Human
uuuucagucucacuuuagaaau

SEQ ID NO: 1378799 - RNA, 23 nt, Human
uuuugucuuuuuacugauacuga

SEQ ID NO: 1378800 - RNA, 23 nt, Human
uuuuuucuucuauuccuguuuuu

SEQ ID NO: 1378801 - RNA, 18 nt, Human
uuuuuuuaaaaaaaaaaa

SEQ ID NO: 1378802 - RNA, 22 nt, Human
aauguucucccaagaauuugag

SEQ ID NO: 1378803 - RNA, 25 nt, Human
accacauaauaugaaaaguccacaa

SEQ ID NO: 1378804 - RNA, 25 nt, Human
accgcagcaacacugccugggccca

SEQ ID NO: 1378805 - RNA, 24 nt, Human
agaaauaguaaaacaacuuaggca

SEQ ID NO: 1378806 - RNA, 24 nt, Human
agaaauaguaaaacaacuuaggca

SEQ ID NO: 1378807 - RNA, 18 nt, Human
agaaggaaucauuuagua

SEQ ID NO: 1378808 - RNA, 21 nt, Human
aggauuggggccccuggacaa

SEQ ID NO: 1378809 - RNA, 21 nt, Human
caaaagacacgcccccgccau

SEQ ID NO: 1378810 - RNA, 22 nt, Human
caagcucacggcucucuccaga

SEQ ID NO: 1378811 - RNA, 25 nt, Human
ccaaaagacacgcccccgccauuua

SEQ ID NO: 1378812 - RNA, 19 nt, Human
cccaagaauuugagcugac

SEQ ID NO: 1378813 - RNA, 22 nt, Human
ccccuggacaagcucacggcuc

SEQ ID NO: 1378814 - RNA, 22 nt, Human
cgcaccgcgccagaaaccgguu

SEQ ID NO: 1378815 - RNA, 24 nt, Human
cuggacaagcucacggcucucucc

SEQ ID NO: 1378816 - RNA, 18 nt, Human
ggacaagcucacggcucu

SEQ ID NO: 1378817 - RNA, 21 nt, Human
uacaguguuuuuaaaaaucua

SEQ ID NO: 1378818 - RNA, 22 nt, Human
uacaguguuuuuaaaaaucuag

SEQ ID NO: 1378819 - RNA, 19 nt, Human
ucacaaagguuacaaauau

SEQ ID NO: 1378820 - RNA, 22 nt, Human
ucauuuaguauuuuacaguguu

SEQ ID NO: 1378821 - RNA, 21 nt, Human
ucucuggaaaugcauagucac

SEQ ID NO: 1378822 - RNA, 22 nt, Human
ugagcugacauuuucauaugaa

SEQ ID NO: 1378823 - RNA, 23 nt, Human
uuaaauauuacauaauuuaaugu

SEQ ID NO: 1378824 - RNA, 20 nt, Human
uuggggccccuggacaagcu

SEQ ID NO: 1378825 - RNA, 23 nt, Human
uuuucauaugaauacaauuucac

SEQ ID NO: 1378826 - RNA, 20 nt, Human
agagagaaaauugugaggag

SEQ ID NO: 1378827 - RNA, 23 nt, Human
agaucuuuagauguucugaguuu

SEQ ID NO: 1378828 - RNA, 21 nt, Human
agcaaucuuaggaaggcaaaa

SEQ ID NO: 1378829 - RNA, 19 nt, Human
aggagacgaaguaaacagg

SEQ ID NO: 1378830 - RNA, 22 nt, Human
auagagguaagagcuagaauac

SEQ ID NO: 1378831 - RNA, 26 nt, Human
ccagcaaucuuaggaaggcaaaauua

SEQ ID NO: 1378832 - RNA, 23 nt, Human
gcuguggagaaccugaauccaaa

SEQ ID NO: 1378833 - RNA, 19 nt, Human
ggccaguggaagacugcug

SEQ ID NO: 1378834 - RNA, 21 nt, Human
guaugccuuuuucucuaccaa

SEQ ID NO: 1378835 - RNA, 26 nt, Human
uaaacagaucuuuauaaucauguaaa

SEQ ID NO: 1378836 - RNA, 19 nt, Human
uacaguuucaauaccagua

SEQ ID NO: 1378837 - RNA, 19 nt, Human
ugagaaagaacauagaggu

SEQ ID NO: 1378838 - RNA, 19 nt, Human
uggccaguggaagacugcu

SEQ ID NO: 1378839 - RNA, 24 nt, Human
ugggagaagagagaaaauugugag

SEQ ID NO: 1378840 - RNA, 25 nt, Human
uggggaaaccuagcuccccucaauu

SEQ ID NO: 1378841 - RNA, 19 nt, Human
uuggcgagguuauuuucuc

SEQ ID NO: 1378842 - RNA, 25 nt, Human
uugggagaagagagaaaauugugag

SEQ ID NO: 1378843 - RNA, 23 nt, Human
uuuguuaggagacgaaguaaaca

SEQ ID NO: 1378844 - RNA, 25 nt, Human
aaaauagagucugccuggcccucuc

SEQ ID NO: 1378845 - RNA, 19 nt, Human
aaaauucucuccaccccaa

SEQ ID NO: 1378846 - RNA, 19 nt, Human
aaagaucagugguuaagag

SEQ ID NO: 1378847 - RNA, 23 nt, Human
aacaauaauaacaauacauucac

SEQ ID NO: 1378848 - RNA, 22 nt, Human
aagaagccaaaauagagucugc

SEQ ID NO: 1378849 - RNA, 19 nt, Human
aagccagauccagacguga

SEQ ID NO: 1378850 - RNA, 24 nt, Human
aaguccuugaggaagggggguggg

SEQ ID NO: 1378851 - RNA, 22 nt, Human
aauuacaggcaugagccacugc

SEQ ID NO: 1378852 - RNA, 23 nt, Human
aauuacaggcaugagccacugca

SEQ ID NO: 1378853 - RNA, 25 nt, Human
aauuccucuccacccuucuucaguu

SEQ ID NO: 1378854 - RNA, 26 nt, Human
acaacaacaacaaaacaauaauaaca

SEQ ID NO: 1378855 - RNA, 24 nt, Human
acaggcaagaaagugaaaaagaua

SEQ ID NO: 1378856 - RNA, 23 nt, Human
accagcucccuguguuuuaugcu

SEQ ID NO: 1378857 - RNA, 23 nt, Human
acccaggcuggagugcaguggug

SEQ ID NO: 1378858 - RNA, 24 nt, Human
acccaggcuggagugcaguggugu

SEQ ID NO: 1378859 - RNA, 23 nt, Human
accccgagauguguuagucuggg

SEQ ID NO: 1378860 - RNA, 19 nt, Human
accuccaucccucugccuc

SEQ ID NO: 1378861 - RNA, 27 nt, Human
agaaaaacaaacaguuccaggugcagg

SEQ ID NO: 1378862 - RNA, 18 nt, Human
agaagcaaaacaggcaag

SEQ ID NO: 1378863 - RNA, 20 nt, Human
agaagcaaaacaggcaagaa

SEQ ID NO: 1378864 - RNA, 18 nt, Human
agccucccgaguagcugg

SEQ ID NO: 1378865 - RNA, 20 nt, Human
agcgaagaagccaaaauaga

SEQ ID NO: 1378866 - RNA, 27 nt, Human
aggcaagaaagugaaaaagagggaccc

SEQ ID NO: 1378867 - RNA, 20 nt, Human
aggcccaggguuaugaacaa

SEQ ID NO: 1378868 - RNA, 25 nt, Human
aggcuggagugcaguggugugaucu

SEQ ID NO: 1378869 - RNA, 21 nt, Human
aggguuccugccucagccucc

SEQ ID NO: 1378870 - RNA, 19 nt, Human
agguaggguaucacauugg

SEQ ID NO: 1378871 - RNA, 22 nt, Human
aguagagaugggguuucgccau

SEQ ID NO: 1378872 - RNA, 18 nt, Human
aguagcugggguuacagg

SEQ ID NO: 1378873 - RNA, 22 nt, Human
agucugggcuggggagggcccu

SEQ ID NO: 1378874 - RNA, 19 nt, Human
agugcaguggugugaucuc

SEQ ID NO: 1378875 - RNA, 21 nt, Human
agugcaguggugugaucucag

SEQ ID NO: 1378876 - RNA, 23 nt, Human
agugcaguggugugaucucagcu

SEQ ID NO: 1378877 - RNA, 24 nt, Human
agugcaguggugugaucucagcuc

SEQ ID NO: 1378878 - RNA, 24 nt, Human
aguggugugaucucagcucacugc

SEQ ID NO: 1378879 - RNA, 23 nt, Human
augggguuucgccauguuggcca

SEQ ID NO: 1378880 - RNA, 24 nt, Human
augggguuucgccauguuggccag

SEQ ID NO: 1378881 - RNA, 21 nt, Human
auguagccucuacuuccucag

SEQ ID NO: 1378882 - RNA, 19 nt, Human
auguguguguaaugugugu

SEQ ID NO: 1378883 - RNA, 21 nt, Human
augugugugucauugugaugu

SEQ ID NO: 1378884 - RNA, 19 nt, Human
augugugugugaugugugu

SEQ ID NO: 1378885 - RNA, 22 nt, Human
auguuguguguguguaauguug

SEQ ID NO: 1378886 - RNA, 18 nt, Human
caaaacaggcaagaaagu

SEQ ID NO: 1378887 - RNA, 22 nt, Human
caaaauucucuccaccccaaag

SEQ ID NO: 1378888 - RNA, 21 nt, Human
caacaacaacaaaacaauaau

SEQ ID NO: 1378889 - RNA, 20 nt, Human
caacacagaaguaccuaaca

SEQ ID NO: 1378890 - RNA, 18 nt, Human
caaccucaaccuccaggg

SEQ ID NO: 1378891 - RNA, 21 nt, Human
caaccuccaggguuccugccu

SEQ ID NO: 1378892 - RNA, 18 nt, Human
cacaguaucuuaucagua

SEQ ID NO: 1378893 - RNA, 22 nt, Human
cacaugugaugaguuguggaau

SEQ ID NO: 1378894 - RNA, 24 nt, Human
cacccaggcuggagugcaguggug

SEQ ID NO: 1378895 - RNA, 23 nt, Human
cacuuguugcugaugguugcccc

SEQ ID NO: 1378896 - RNA, 19 nt, Human
cagaaaaacaaacaguucc

SEQ ID NO: 1378897 - RNA, 21 nt, Human
cagccucccgaguagcugggg

SEQ ID NO: 1378898 - RNA, 23 nt, Human
cagcucccuguguuuuaugcuuc

SEQ ID NO: 1378899 - RNA, 25 nt, Human
caggugcaggggcuuuaaaucuauc

SEQ ID NO: 1378900 - RNA, 21 nt, Human
caggugccccccaccacaccc

SEQ ID NO: 1378901 - RNA, 20 nt, Human
cagugguuaagaggcccagg

SEQ ID NO: 1378902 - RNA, 22 nt, Human
cauguuggccaggcuggucugg

SEQ ID NO: 1378903 - RNA, 24 nt, Human
ccacacugcagcaauggugggaac

SEQ ID NO: 1378904 - RNA, 22 nt, Human
ccacccuucuucaguuuguucc

SEQ ID NO: 1378905 - RNA, 19 nt, Human
ccauguuggccaggcuggu

SEQ ID NO: 1378906 - RNA, 20 nt, Human
ccauguuggccaggcugguc

SEQ ID NO: 1378907 - RNA, 21 nt, Human
cccacccaacccaccagcucc

SEQ ID NO: 1378908 - RNA, 19 nt, Human
ccccauccgacuccucccu

SEQ ID NO: 1378909 - RNA, 23 nt, Human
cccgaguagcugggguuacaggu

SEQ ID NO: 1378910 - RNA, 24 nt, Human
cccgaguagcugggguuacaggug

SEQ ID NO: 1378911 - RNA, 18 nt, Human
cccucugccucuaggagc

SEQ ID NO: 1378912 - RNA, 18 nt, Human
ccggacgaauuccuggga

SEQ ID NO: 1378913 - RNA, 28 nt, Human
ccuccagccacacugcagcaaugcucau

SEQ ID NO: 1378914 - RNA, 18 nt, Human
ccuccaugggucauuacc

SEQ ID NO: 1378915 - RNA, 18 nt, Human
ccucccuuucccuguggg

SEQ ID NO: 1378916 - RNA, 19 nt, Human
ccucuaggagccaccacuu

SEQ ID NO: 1378917 - RNA, 20 nt, Human
ccucuaggagccaccacuug

SEQ ID NO: 1378918 - RNA, 21 nt, Human
ccugacaauuccucuccaccc

SEQ ID NO: 1378919 - RNA, 24 nt, Human
ccugcauuuccacugcaaucuauc

SEQ ID NO: 1378920 - RNA, 23 nt, Human
ccugccucagccucccgaguagc

SEQ ID NO: 1378921 - RNA, 18 nt, Human
ccuugaggaaggggggug

SEQ ID NO: 1378922 - RNA, 20 nt, Human
ccuugaggaagggggguggg

SEQ ID NO: 1378923 - RNA, 21 nt, Human
ccuugaggaaggggggugggu

SEQ ID NO: 1378924 - RNA, 23 nt, Human
ccuugcucugucacccaggcugg

SEQ ID NO: 1378925 - RNA, 24 nt, Human
ccuugcucugucacccaggcugga

SEQ ID NO: 1378926 - RNA, 18 nt, Human
cgagcugaagcaauuuua

SEQ ID NO: 1378927 - RNA, 22 nt, Human
cgccauguuggccaggcugguc

SEQ ID NO: 1378928 - RNA, 24 nt, Human
cucagccucccgaguagcuggggu

SEQ ID NO: 1378929 - RNA, 18 nt, Human
cuccaggguuccugccuc

SEQ ID NO: 1378930 - RNA, 24 nt, Human
cugcaaccucaaccuccaggguuc

SEQ ID NO: 1378931 - RNA, 23 nt, Human
cugccucagccucccgaguagcu

SEQ ID NO: 1378932 - RNA, 24 nt, Human
cuggagugcaguggugugaucuca

SEQ ID NO: 1378933 - RNA, 18 nt, Human
cugucacccaggcuggag

SEQ ID NO: 1378934 - RNA, 23 nt, Human
gaacaaggucugguccucacccc

SEQ ID NO: 1378935 - RNA, 22 nt, Human
gaauuacaggcaugagccacug

SEQ ID NO: 1378936 - RNA, 18 nt, Human
gagaugggguuucgccau

SEQ ID NO: 1378937 - RNA, 24 nt, Human
gagaugggguuucgccauguuggc

SEQ ID NO: 1378938 - RNA, 18 nt, Human
gagccgagcugaagcaau

SEQ ID NO: 1378939 - RNA, 18 nt, Human
gauguguguguaaugugu

SEQ ID NO: 1378940 - RNA, 22 nt, Human
gcaaccucaaccuccaggguuc

SEQ ID NO: 1378941 - RNA, 21 nt, Human
gcgggauguagccucuacuuc

SEQ ID NO: 1378942 - RNA, 25 nt, Human
gcucugucacccaggcuggagugca

SEQ ID NO: 1378943 - RNA, 21 nt, Human
gcucuuuaggccugacaauuc

SEQ ID NO: 1378944 - RNA, 23 nt, Human
gcuggucuggagcuccugaccuc

SEQ ID NO: 1378945 - RNA, 26 nt, Human
gcuuaaguccuugaggaaggggggug

SEQ ID NO: 1378946 - RNA, 22 nt, Human
ggauguagccucuacuuccuca

SEQ ID NO: 1378947 - RNA, 19 nt, Human
ggauucccuccagccacac

SEQ ID NO: 1378948 - RNA, 22 nt, Human
ggcuggagugcaguggugugau

SEQ ID NO: 1378949 - RNA, 24 nt, Human
ggcuggucuggagcuccugaccuc

SEQ ID NO: 1378950 - RNA, 18 nt, Human
ggcuguguguauaugugu

SEQ ID NO: 1378951 - RNA, 22 nt, Human
gggguuucgccauguuggccag

SEQ ID NO: 1378952 - RNA, 23 nt, Human
guaauuuuuuguauuuuuaguag

SEQ ID NO: 1378953 - RNA, 23 nt, Human
guagagaugggguuucgccaugu

SEQ ID NO: 1378954 - RNA, 24 nt, Human
guaucacauuggaauuacaggcau

SEQ ID NO: 1378955 - RNA, 18 nt, Human
gugggugagagacugcaa

SEQ ID NO: 1378956 - RNA, 22 nt, Human
guggugugugccugcauuucca

SEQ ID NO: 1378957 - RNA, 18 nt, Human
gugugugugaugugugug

SEQ ID NO: 1378958 - RNA, 19 nt, Human
guuucagauuuuggagcau

SEQ ID NO: 1378959 - RNA, 20 nt, Human
uaaacuucguggugugugcc

SEQ ID NO: 1378960 - RNA, 25 nt, Human
uaacagaaaaacaaacaguuccagg

SEQ ID NO: 1378961 - RNA, 23 nt, Human
uaacaguaaaagaugagagauac

SEQ ID NO: 1378962 - RNA, 21 nt, Human
uaaccagcaaucauuuuccuc

SEQ ID NO: 1378963 - RNA, 24 nt, Human
uaauuuuuuguauuuuuaguagag

SEQ ID NO: 1378964 - RNA, 25 nt, Human
uaauuuuuuguauuuuuaguagaga

SEQ ID NO: 1378965 - RNA, 21 nt, Human
uacagaagcaaaacaggcaag

SEQ ID NO: 1378966 - RNA, 24 nt, Human
uacaggcaugagccacugcaccca

SEQ ID NO: 1378967 - RNA, 24 nt, Human
uacaggugccccccaccacaccca

SEQ ID NO: 1378968 - RNA, 21 nt, Human
uaccuaucuggcaugugagaa

SEQ ID NO: 1378969 - RNA, 19 nt, Human
uaccuccaucccucugccu

SEQ ID NO: 1378970 - RNA, 22 nt, Human
uagagaugggguuucgccaugu

SEQ ID NO: 1378971 - RNA, 24 nt, Human
uaguagagaugggguuucgccaug

SEQ ID NO: 1378972 - RNA, 21 nt, Human
uauacuacuaaccagcaauca

SEQ ID NO: 1378973 - RNA, 21 nt, Human
uaucaguaaucgcauucuugg

SEQ ID NO: 1378974 - RNA, 23 nt, Human
ucaaaauucucuccaccccaaag

SEQ ID NO: 1378975 - RNA, 20 nt, Human
ucacaacaacaacaaaacaa

SEQ ID NO: 1378976 - RNA, 22 nt, Human
ucacaugugaugaguuguggaa

SEQ ID NO: 1378977 - RNA, 22 nt, Human
ucacccaggcuggagugcagug

SEQ ID NO: 1378978 - RNA, 23 nt, Human
ucacugcaaccucaaccuccagg

SEQ ID NO: 1378979 - RNA, 24 nt, Human
ucacugcaaccucaaccuccaggg

SEQ ID NO: 1378980 - RNA, 20 nt, Human
ucagccucccgaguagcugg

SEQ ID NO: 1378981 - RNA, 21 nt, Human
ucagcucacugcaaccucaac

SEQ ID NO: 1378982 - RNA, 23 nt, Human
uccacccuucuucaguuuguucc

SEQ ID NO: 1378983 - RNA, 19 nt, Human
uccaugggucauuaccucc

SEQ ID NO: 1378984 - RNA, 23 nt, Human
ucccgaguagcugggguuacagg

SEQ ID NO: 1378985 - RNA, 20 nt, Human
uccuugaggaaggggggugg

SEQ ID NO: 1378986 - RNA, 25 nt, Human
uccuugaggaaggggggugggugag

SEQ ID NO: 1378987 - RNA, 22 nt, Human
ucgccauguuggccaggcuggu

SEQ ID NO: 1378988 - RNA, 24 nt, Human
ucgccauguuggccaggcuggucu

SEQ ID NO: 1378989 - RNA, 19 nt, Human
ucugggcuggggagggccc

SEQ ID NO: 1378990 - RNA, 24 nt, Human
ucugucacccaggcuggagugcag

SEQ ID NO: 1378991 - RNA, 23 nt, Human
ugagaugggagccuugcucuguc

SEQ ID NO: 1378992 - RNA, 22 nt, Human
ugcaguggugugaucucagcuc

SEQ ID NO: 1378993 - RNA, 24 nt, Human
ugcauagacccucuaauuuguaug

SEQ ID NO: 1378994 - RNA, 22 nt, Human
ugcccccacccaacccaccagc

SEQ ID NO: 1378995 - RNA, 18 nt, Human
ugccccccaccacaccca

SEQ ID NO: 1378996 - RNA, 24 nt, Human
ugccucagccucccgaguagcugg

SEQ ID NO: 1378997 - RNA, 24 nt, Human
ugcucugucacccaggcuggagug

SEQ ID NO: 1378998 - RNA, 21 nt, Human
uggaauuacaggcaugagcca

SEQ ID NO: 1378999 - RNA, 22 nt, Human
uggaauuacaggcaugagccac

SEQ ID NO: 1379000 - RNA, 22 nt, Human
uggaauuacaggcaugagccac

SEQ ID NO: 1379001 - RNA, 24 nt, Human
uggaauuacaggcaugagccacug

SEQ ID NO: 1379002 - RNA, 24 nt, Human
uggaauuacaggcaugagccacug

SEQ ID NO: 1379003 - RNA, 26 nt, Human
uggaauuacaggcaugagccacugca

SEQ ID NO: 1379004 - RNA, 20 nt, Human
uggacuugagccaacugggu

SEQ ID NO: 1379005 - RNA, 19 nt, Human
uggagugcaguggugugau

SEQ ID NO: 1379006 - RNA, 24 nt, Human
uggagugcaguggugugaucucag

SEQ ID NO: 1379007 - RNA, 24 nt, Human
uggccaggcuggucuggagcuccu

SEQ ID NO: 1379008 - RNA, 21 nt, Human
uggcccucucagcuaagggag

SEQ ID NO: 1379009 - RNA, 24 nt, Human
uggcggauugucauucuguccugg

SEQ ID NO: 1379010 - RNA, 18 nt, Human
ugggcuggggagggcccu

SEQ ID NO: 1379011 - RNA, 22 nt, Human
ugggguuacaggugccccccac

SEQ ID NO: 1379012 - RNA, 24 nt, Human
ugggguuucgccauguuggccagg

SEQ ID NO: 1379013 - RNA, 24 nt, Human
uggugugaucucagcucacugcaa

SEQ ID NO: 1379014 - RNA, 21 nt, Human
uguauuuuuaguagagauggg

SEQ ID NO: 1379015 - RNA, 22 nt, Human
ugugauguguguguaaugugug

SEQ ID NO: 1379016 - RNA, 23 nt, Human
ugugaugugugugugaugugugu

SEQ ID NO: 1379017 - RNA, 23 nt, Human
ugugauguuguguguguguaaug

SEQ ID NO: 1379018 - RNA, 18 nt, Human
uguguaauguguguuugu

SEQ ID NO: 1379019 - RNA, 18 nt, Human
uguguaauguguguuugu

SEQ ID NO: 1379020 - RNA, 18 nt, Human
uguguaauguguguuugu

SEQ ID NO: 1379021 - RNA, 18 nt, Human
uguguguauaugugugua

SEQ ID NO: 1379022 - RNA, 19 nt, Human
uguguguauauguguguaa

SEQ ID NO: 1379023 - RNA, 21 nt, Human
uguguguauauguguguaaug

SEQ ID NO: 1379024 - RNA, 25 nt, Human
uguguguauauguguguaauguugu

SEQ ID NO: 1379025 - RNA, 18 nt, Human
ugugugugaugugugugu

SEQ ID NO: 1379026 - RNA, 18 nt, Human
uguguguguaaugugugu

SEQ ID NO: 1379027 - RNA, 18 nt, Human
uguguguguaaugugugu

SEQ ID NO: 1379028 - RNA, 20 nt, Human
uguguguguguaauguugug

SEQ ID NO: 1379029 - RNA, 20 nt, Human
uguugcugaugguugccccc

SEQ ID NO: 1379030 - RNA, 20 nt, Human
uguuguguguguaaugugug

SEQ ID NO: 1379031 - RNA, 20 nt, Human
uguuguguguguaaugugug

SEQ ID NO: 1379032 - RNA, 20 nt, Human
uguuguguguguaaugugug

SEQ ID NO: 1379033 - RNA, 20 nt, Human
uguuguguguguaaugugug

SEQ ID NO: 1379034 - RNA, 21 nt, Human
uguuguguguuugucauuggu

SEQ ID NO: 1379035 - RNA, 24 nt, Human
uguuuuuuuguuuuuugagauggg

SEQ ID NO: 1379036 - RNA, 23 nt, Human
uuacagaagcaaaacaggcaaga

SEQ ID NO: 1379037 - RNA, 20 nt, Human
uuacaggugccccccaccac

SEQ ID NO: 1379038 - RNA, 18 nt, Human
uuaguagagaugggguuu

SEQ ID NO: 1379039 - RNA, 22 nt, Human
uuaguagagaugggguuucgcc

SEQ ID NO: 1379040 - RNA, 24 nt, Human
uuaguagagaugggguuucgccau

SEQ ID NO: 1379041 - RNA, 24 nt, Human
uugcucugucacccaggcuggagu

SEQ ID NO: 1379042 - RNA, 20 nt, Human
uugggugcuaucaaccggac

SEQ ID NO: 1379043 - RNA, 23 nt, Human
uuguauuuuuaguagagaugggg

SEQ ID NO: 1379044 - RNA, 21 nt, Human
uuuccacugcaaucuaucaca

SEQ ID NO: 1379045 - RNA, 24 nt, Human
uuucgccauguuggccaggcuggu

SEQ ID NO: 1379046 - RNA, 23 nt, Human
uuugagaugggagccuugcucug

SEQ ID NO: 1379047 - RNA, 23 nt, Human
uuuuuaguagagaugggguuucg

SEQ ID NO: 1379048 - RNA, 24 nt, Human
uuuuuaguagagaugggguuucgc

SEQ ID NO: 1379049 - RNA, 25 nt, Human
uuuuugagaugggagccuugcucug

SEQ ID NO: 1379050 - RNA, 21 nt, Human
uuuuuguauuuuuaguagaga

SEQ ID NO: 1379051 - RNA, 24 nt, Human
uuuuuuguauuuuuaguagagaug

SEQ ID NO: 1379052 - RNA, 19 nt, Human
aaaaaucaaucagaauuua

SEQ ID NO: 1379053 - RNA, 22 nt, Human
aaaacaaagagaaaaaguugga

SEQ ID NO: 1379054 - RNA, 21 nt, Human
aaaaucaaucagaauuuacca

SEQ ID NO: 1379055 - RNA, 21 nt, Human
aaaguucuuccaaaaacgcau

SEQ ID NO: 1379056 - RNA, 21 nt, Human
aaauagacuacagcagacaaa

SEQ ID NO: 1379057 - RNA, 24 nt, Human
aacacuggacaaaaacaaagagaa

SEQ ID NO: 1379058 - RNA, 21 nt, Human
aaugccgaugacaacagagaa

SEQ ID NO: 1379059 - RNA, 25 nt, Human
aauguuuauuuacccucaaguuuug

SEQ ID NO: 1379060 - RNA, 24 nt, Human
acagcccaggggccaaaucugguc

SEQ ID NO: 1379061 - RNA, 18 nt, Human
acagucugaaauauuuac

SEQ ID NO: 1379062 - RNA, 19 nt, Human
accacaaucaucauaaaca

SEQ ID NO: 1379063 - RNA, 21 nt, Human
acccucaaguuuuguucuagu

SEQ ID NO: 1379064 - RNA, 20 nt, Human
agaaauucuuaacaaggaca

SEQ ID NO: 1379065 - RNA, 23 nt, Human
aguaccuucuauuccucugugaa

SEQ ID NO: 1379066 - RNA, 18 nt, Human
agucugaaauauuuacaa

SEQ ID NO: 1379067 - RNA, 24 nt, Human
augacagagacuguauguggccuu

SEQ ID NO: 1379068 - RNA, 24 nt, Human
auuuauagaaacagacauauucaa

SEQ ID NO: 1379069 - RNA, 18 nt, Human
caaaaacaaagagaaaaa

SEQ ID NO: 1379070 - RNA, 27 nt, Human
caaagugcuggaagugcaauuguagua

SEQ ID NO: 1379071 - RNA, 24 nt, Human
caaccaucugugguucccacaaac

SEQ ID NO: 1379072 - RNA, 23 nt, Human
cacaaucaucauaaacaucaagg

SEQ ID NO: 1379073 - RNA, 18 nt, Human
caggggccaaaucugguc

SEQ ID NO: 1379074 - RNA, 19 nt, Human
caucacauaguaacauggg

SEQ ID NO: 1379075 - RNA, 18 nt, Human
caucauaaacaucaagua

SEQ ID NO: 1379076 - RNA, 23 nt, Human
caucuucuagccuccuucuaacc

SEQ ID NO: 1379077 - RNA, 23 nt, Human
ccggccugggaacccagcuacac

SEQ ID NO: 1379078 - RNA, 19 nt, Human
ccugcuucagaaacagagu

SEQ ID NO: 1379079 - RNA, 19 nt, Human
cuggacaaaaacaaagaga

SEQ ID NO: 1379080 - RNA, 18 nt, Human
cuuaacaaggacaaggua

SEQ ID NO: 1379081 - RNA, 26 nt, Human
cuuacuguucaaccccaaagguuuuc

SEQ ID NO: 1379082 - RNA, 20 nt, Human
gaaacugaugaaaaugguuu

SEQ ID NO: 1379083 - RNA, 27 nt, Human
gcaacacuggacaaaaacaaagagaaa

SEQ ID NO: 1379084 - RNA, 23 nt, Human
gccugaauucaucuucuagccuc

SEQ ID NO: 1379085 - RNA, 22 nt, Human
guccacacagucugaaauauuu

SEQ ID NO: 1379086 - RNA, 18 nt, Human
guggaccuuucccuaugc

SEQ ID NO: 1379087 - RNA, 22 nt, Human
uaagcgaagucuggcuaugaua

SEQ ID NO: 1379088 - RNA, 21 nt, Human
uacaaucuggcccuuuacaga

SEQ ID NO: 1379089 - RNA, 22 nt, Human
uaccaagcaauucacguaccac

SEQ ID NO: 1379090 - RNA, 24 nt, Human
uagaugaggggucagcaaacuaca

SEQ ID NO: 1379091 - RNA, 21 nt, Human
uauaaaacaccuuauaaagau

SEQ ID NO: 1379092 - RNA, 24 nt, Human
uaugauaaaguaccuucuauuccu

SEQ ID NO: 1379093 - RNA, 26 nt, Human
uauucuauuuucucuucaugguuuca

SEQ ID NO: 1379094 - RNA, 18 nt, Human
uauuuucucuucaugguu

SEQ ID NO: 1379095 - RNA, 19 nt, Human
ucaaagugcuggaagugca

SEQ ID NO: 1379096 - RNA, 20 nt, Human
ucaaagugcuggaagugcaa

SEQ ID NO: 1379097 - RNA, 24 nt, Human
uccacacagucugaaauauuuaca

SEQ ID NO: 1379098 - RNA, 19 nt, Human
ucuagugucagauacagac

SEQ ID NO: 1379099 - RNA, 18 nt, Human
ucucaaagugcuggaagu

SEQ ID NO: 1379100 - RNA, 24 nt, Human
ucucugaauuagcaccauuaguuc

SEQ ID NO: 1379101 - RNA, 20 nt, Human
ucuguaaacuaucuaauagc

SEQ ID NO: 1379102 - RNA, 22 nt, Human
ugaaauauuuacaaucuggccc

SEQ ID NO: 1379103 - RNA, 21 nt, Human
ugaggugugcugguuccauca

SEQ ID NO: 1379104 - RNA, 24 nt, Human
ugaguaguuaugacagagacugua

SEQ ID NO: 1379105 - RNA, 21 nt, Human
ugcuuacuguucaaccccaac

SEQ ID NO: 1379106 - RNA, 19 nt, Human
uggccauuuuguaccaagc

SEQ ID NO: 1379107 - RNA, 19 nt, Human
uguaccaagcaauucacgu

SEQ ID NO: 1379108 - RNA, 21 nt, Human
uguucaaccccaaccaucugu

SEQ ID NO: 1379109 - RNA, 24 nt, Human
uuagcaccauuaguucagaaauca

SEQ ID NO: 1379110 - RNA, 24 nt, Human
uucaagaaauucuuaacaaggaca

SEQ ID NO: 1379111 - RNA, 21 nt, Human
uuccucugugaacuggccauu

SEQ ID NO: 1379112 - RNA, 18 nt, Human
uucucaaagugcuggaag

SEQ ID NO: 1379113 - RNA, 22 nt, Human
uucuuccaaaaacgcauuuaaa

SEQ ID NO: 1379114 - RNA, 18 nt, Human
uuugguugaggugugcug

SEQ ID NO: 1379115 - RNA, 19 nt, Human
uuugguugaggugugcugg

SEQ ID NO: 1379116 - RNA, 19 nt, Human
aaaagccuuaccacacuca

SEQ ID NO: 1379117 - RNA, 19 nt, Human
aaagauuucccacacucaa

SEQ ID NO: 1379118 - RNA, 24 nt, Human
aaagcuuuuccacauucaucacau

SEQ ID NO: 1379119 - RNA, 19 nt, Human
aaaggagagagcuguaacu

SEQ ID NO: 1379120 - RNA, 24 nt, Human
aagccaugacccccuacauucuua

SEQ ID NO: 1379121 - RNA, 21 nt, Human
acacuggagccuuucuugcuu

SEQ ID NO: 1379122 - RNA, 23 nt, Human
accugucacauucauaggguuuc

SEQ ID NO: 1379123 - RNA, 21 nt, Human
acucacaauuauagggcugcu

SEQ ID NO: 1379124 - RNA, 18 nt, Human
acucgucacacuuaaagg

SEQ ID NO: 1379125 - RNA, 28 nt, Human
agaaaggauuccucauaauccucuagga

SEQ ID NO: 1379126 - RNA, 19 nt, Human
agagagugagcccugaaca

SEQ ID NO: 1379127 - RNA, 21 nt, Human
auaggguuucucaccugugug

SEQ ID NO: 1379128 - RNA, 20 nt, Human
augucuacugauuuugaaga

SEQ ID NO: 1379129 - RNA, 20 nt, Human
auuaugggaguucaucugaa

SEQ ID NO: 1379130 - RNA, 21 nt, Human
auucauagggccucuccccag

SEQ ID NO: 1379131 - RNA, 19 nt, Human
auuuguagggcuucucccc

SEQ ID NO: 1379132 - RNA, 19 nt, Human
cacacacaucacauuugua

SEQ ID NO: 1379133 - RNA, 18 nt, Human
cacacaucacauucauag

SEQ ID NO: 1379134 - RNA, 19 nt, Human
cacaccuaucacacacaua

SEQ ID NO: 1379135 - RNA, 19 nt, Human
cacauucaucacauguaug

SEQ ID NO: 1379136 - RNA, 18 nt, Human
cacugcccccucccaaac

SEQ ID NO: 1379137 - RNA, 19 nt, Human
cacuguguaaauuacaagc

SEQ ID NO: 1379138 - RNA, 25 nt, Human
caggauuauuaagaaacauuaauuu

SEQ ID NO: 1379139 - RNA, 19 nt, Human
caucacugcccccucccaa

SEQ ID NO: 1379140 - RNA, 19 nt, Human
cauucauagggccucuccc

SEQ ID NO: 1379141 - RNA, 20 nt, Human
cauucaucacauguaugggg

SEQ ID NO: 1379142 - RNA, 23 nt, Human
cauucaucacauguaugggguug

SEQ ID NO: 1379143 - RNA, 23 nt, Human
cauuccaucacucagaucuaagu

SEQ ID NO: 1379144 - RNA, 23 nt, Human
ccaaaaacaaucaaacauuuaac

SEQ ID NO: 1379145 - RNA, 18 nt, Human
ccacaaggagcuggcuuu

SEQ ID NO: 1379146 - RNA, 21 nt, Human
ccccauccagggcauucccuc

SEQ ID NO: 1379147 - RNA, 22 nt, Human
ccucauagguucucuucuggga

SEQ ID NO: 1379148 - RNA, 23 nt, Human
ccuugacacuggagccuuucuug

SEQ ID NO: 1379149 - RNA, 21 nt, Human
cucccaaaccaauuacaucaa

SEQ ID NO: 1379150 - RNA, 18 nt, Human
gccacuauaacuucccac

SEQ ID NO: 1379151 - RNA, 22 nt, Human
gcccccucccaaaccaauuaca

SEQ ID NO: 1379152 - RNA, 21 nt, Human
gccucuccccaguauggauuc

SEQ ID NO: 1379153 - RNA, 21 nt, Human
gccugcuacagaggcauccuc

SEQ ID NO: 1379154 - RNA, 22 nt, Human
ggccugagcuguuccugaaggc

SEQ ID NO: 1379155 - RNA, 23 nt, Human
uaaaaggaaauccaaauuuuguu

SEQ ID NO: 1379156 - RNA, 23 nt, Human
uaacacauuccaaaaacaaucaa

SEQ ID NO: 1379157 - RNA, 20 nt, Human
uaacugaaagauuucccaca

SEQ ID NO: 1379158 - RNA, 24 nt, Human
uaacugaaagauuucccacacuca

SEQ ID NO: 1379159 - RNA, 25 nt, Human
uacaacagacaacauauacaugucc

SEQ ID NO: 1379160 - RNA, 21 nt, Human
uacaauaacacauuccaaaag

SEQ ID NO: 1379161 - RNA, 24 nt, Human
uaccugaauuuccuacauuucuag

SEQ ID NO: 1379162 - RNA, 20 nt, Human
uagcuucugcaauaaaaugc

SEQ ID NO: 1379163 - RNA, 23 nt, Human
uaugggguguccugccagggugg

SEQ ID NO: 1379164 - RNA, 19 nt, Human
ucacugcccccucccaaac

SEQ ID NO: 1379165 - RNA, 21 nt, Human
ucacugcccccucccaaacca

SEQ ID NO: 1379166 - RNA, 22 nt, Human
uccacgguagaaccuuuuauug

SEQ ID NO: 1379167 - RNA, 24 nt, Human
uccacuuuaccucgccacaaggag

SEQ ID NO: 1379168 - RNA, 20 nt, Human
uccacuuuaccucgccaccg

SEQ ID NO: 1379169 - RNA, 24 nt, Human
ucccacacucaacacacuugaagg

SEQ ID NO: 1379170 - RNA, 19 nt, Human
uccucuccacgguagaacc

SEQ ID NO: 1379171 - RNA, 21 nt, Human
ucugugcugagaaaggagcga

SEQ ID NO: 1379172 - RNA, 20 nt, Human
ucuguguuuuauguccagaa

SEQ ID NO: 1379173 - RNA, 20 nt, Human
ugagaaaaaagcuuuuccac

SEQ ID NO: 1379174 - RNA, 22 nt, Human
ugagaaaaaagcuuuuccacau

SEQ ID NO: 1379175 - RNA, 21 nt, Human
ugagaaaggagagagcuguaa

SEQ ID NO: 1379176 - RNA, 25 nt, Human
ugcuacagaggcauccucauccugc

SEQ ID NO: 1379177 - RNA, 19 nt, Human
uguaauugggauucaaagc

SEQ ID NO: 1379178 - RNA, 21 nt, Human
uguaugggguguccugccagg

SEQ ID NO: 1379179 - RNA, 23 nt, Human
uuaauuuccuucucucuagauga

SEQ ID NO: 1379180 - RNA, 18 nt, Human
uuacugaaugugucaaaa

SEQ ID NO: 1379181 - RNA, 22 nt, Human
uucaugacaaagagagagugag

SEQ ID NO: 1379182 - RNA, 25 nt, Human
uuccaaaaacaaucaaacauuuaac

SEQ ID NO: 1379183 - RNA, 23 nt, Human
uucccacaccuaucacacacaua

SEQ ID NO: 1379184 - RNA, 21 nt, Human
uucccacacucaacacacuug

SEQ ID NO: 1379185 - RNA, 18 nt, Human
uucccacacucaucacau

SEQ ID NO: 1379186 - RNA, 21 nt, Human
uugaguucggagagacuuggu

SEQ ID NO: 1379187 - RNA, 19 nt, Human
uuuguagggcuucucccca

SEQ ID NO: 1379188 - RNA, 19 nt, Human
uuuuauauccuguaagagc

SEQ ID NO: 1379189 - RNA, 22 nt, Human
aaaaaaacagaccucagcugca

SEQ ID NO: 1379190 - RNA, 19 nt, Human
aaaaaaacagaccucaggg

SEQ ID NO: 1379191 - RNA, 22 nt, Human
aaaaacagaccucagcugcaua

SEQ ID NO: 1379192 - RNA, 24 nt, Human
aaaacaaaaaacgaaaaacaaaaa

SEQ ID NO: 1379193 - RNA, 19 nt, Human
aagagugaagacaauucau

SEQ ID NO: 1379194 - RNA, 18 nt, Human
aauggaauguguuuuuau

SEQ ID NO: 1379195 - RNA, 23 nt, Human
aauggcuuuuuuuuccuccuuuc

SEQ ID NO: 1379196 - RNA, 21 nt, Human
acaaagcaccuccucagcucc

SEQ ID NO: 1379197 - RNA, 20 nt, Human
acagagcuguuccucaaaag

SEQ ID NO: 1379198 - RNA, 22 nt, Human
acgaaaaacaaaaaaacagacc

SEQ ID NO: 1379199 - RNA, 18 nt, Human
agaagcccaggaacauug

SEQ ID NO: 1379200 - RNA, 33 nt, Human
auacacacacacacacacacgugaauauguggu

SEQ ID NO: 1379201 - RNA, 20 nt, Human
auccaaaaaaaucuucugua

SEQ ID NO: 1379202 - RNA, 24 nt, Human
augaaaaacaaaaaacgaaaaaca

SEQ ID NO: 1379203 - RNA, 18 nt, Human
caaaaaaacagaccucaa

SEQ ID NO: 1379204 - RNA, 18 nt, Human
caaaaaaacagaccucag

SEQ ID NO: 1379205 - RNA, 26 nt, Human
cacacacacacacacgugaauaugug

SEQ ID NO: 1379206 - RNA, 19 nt, Human
cagaagugcuuccacuuug

SEQ ID NO: 1379207 - RNA, 18 nt, Human
cagcucaugaaaauggcu

SEQ ID NO: 1379208 - RNA, 20 nt, Human
cagggcccaggugagcaaug

SEQ ID NO: 1379209 - RNA, 22 nt, Human
caggucaguaaaaauuaaaaug

SEQ ID NO: 1379210 - RNA, 28 nt, Human
caguaaaaauuaaaaugagguaauagua

SEQ ID NO: 1379211 - RNA, 21 nt, Human
caugaaaauggcuuuuuuuuc

SEQ ID NO: 1379212 - RNA, 27 nt, Human
caugagcauaacuuugugacgggcacg

SEQ ID NO: 1379213 - RNA, 18 nt, Human
ccaaaaaaaucuucugua

SEQ ID NO: 1379214 - RNA, 21 nt, Human
ccacuuugaaagaagcccagg

SEQ ID NO: 1379215 - RNA, 19 nt, Human
ccaggcucucuuuauugac

SEQ ID NO: 1379216 - RNA, 19 nt, Human
ccucaaaagcaggaaugaa

SEQ ID NO: 1379217 - RNA, 22 nt, Human
ccuucaaagaaugaagagugaa

SEQ ID NO: 1379218 - RNA, 19 nt, Human
cucuuuccuuuuuaugccc

SEQ ID NO: 1379219 - RNA, 22 nt, Human
cuguaggaaaucuccaaaauuu

SEQ ID NO: 1379220 - RNA, 23 nt, Human
cuucuuauucuuuugcuuuuuua

SEQ ID NO: 1379221 - RNA, 18 nt, Human
cuuuugcuuuuuuaaagg

SEQ ID NO: 1379222 - RNA, 21 nt, Human
gaaaaacaaaaaaacagaccu

SEQ ID NO: 1379223 - RNA, 24 nt, Human
gaaaaacaaaaaaacagaccucag

SEQ ID NO: 1379224 - RNA, 19 nt, Human
gaaagcagaggcucaggga

SEQ ID NO: 1379225 - RNA, 25 nt, Human
gcacuaggucucccaggacaaccca

SEQ ID NO: 1379226 - RNA, 18 nt, Human
gcccaggugagcaauguu

SEQ ID NO: 1379227 - RNA, 19 nt, Human
gcucagaagugcuuccacu

SEQ ID NO: 1379228 - RNA, 18 nt, Human
ggccauggagguucaaac

SEQ ID NO: 1379229 - RNA, 19 nt, Human
gggaaagcagaggcucagg

SEQ ID NO: 1379230 - RNA, 20 nt, Human
gggcccaggugagcaauguu

SEQ ID NO: 1379231 - RNA, 18 nt, Human
uaacaugaauucaacuga

SEQ ID NO: 1379232 - RNA, 20 nt, Human
uaaguccuucaaagaaugaa

SEQ ID NO: 1379233 - RNA, 33 nt, Human
uaauaaaaaaauacacacacacacacacacggu

SEQ ID NO: 1379234 - RNA, 25 nt, Human
uaauaggcuuaacccaauaagugua

SEQ ID NO: 1379235 - RNA, 22 nt, Human
uacaaagcaccuccucagcucc

SEQ ID NO: 1379236 - RNA, 18 nt, Human
uacacacacacacacaca

SEQ ID NO: 1379237 - RNA, 21 nt, Human
uagagcggggccaauucugcu

SEQ ID NO: 1379238 - RNA, 19 nt, Human
uagcagcugauuccauacu

SEQ ID NO: 1379239 - RNA, 18 nt, Human
uauguggaagaaacagca

SEQ ID NO: 1379240 - RNA, 22 nt, Human
ucaaaagcaggaaugaaaaaca

SEQ ID NO: 1379241 - RNA, 20 nt, Human
ucaaccauauucuauccccu

SEQ ID NO: 1379242 - RNA, 22 nt, Human
ucagacaauuaauccaaaaaaa

SEQ ID NO: 1379243 - RNA, 18 nt, Human
uccacaaaggcacaacua

SEQ ID NO: 1379244 - RNA, 20 nt, Human
uccagugcgcaggccccagc

SEQ ID NO: 1379245 - RNA, 20 nt, Human
uccuucuuuaaguaagaaaa

SEQ ID NO: 1379246 - RNA, 21 nt, Human
ugaaagaagcccaggaacauu

SEQ ID NO: 1379247 - RNA, 18 nt, Human
ugaagcuggggucuuggc

SEQ ID NO: 1379248 - RNA, 22 nt, Human
ugaauauguggaagaaacagca

SEQ ID NO: 1379249 - RNA, 19 nt, Human
ugacacuucaaugcuaaag

SEQ ID NO: 1379250 - RNA, 18 nt, Human
ugagacagaacagugagc

SEQ ID NO: 1379251 - RNA, 18 nt, Human
ugcaggucaguaaaaauu

SEQ ID NO: 1379252 - RNA, 22 nt, Human
ugcuggccgcagggcccaggug

SEQ ID NO: 1379253 - RNA, 22 nt, Human
ugcuuuuuuaaagguuguuaua

SEQ ID NO: 1379254 - RNA, 26 nt, Human
uggcagucacaaagcacauauaagaa

SEQ ID NO: 1379255 - RNA, 19 nt, Human
uggccgcagggcccaggug

SEQ ID NO: 1379256 - RNA, 23 nt, Human
uuagagcuagccuguuaggcugc

SEQ ID NO: 1379257 - RNA, 22 nt, Human
uucaaagaaugaagagugaaga

SEQ ID NO: 1379258 - RNA, 24 nt, Human
uucuuauucuuuugcuuuuuuaaa

SEQ ID NO: 1379259 - RNA, 18 nt, Human
uugugugaguuuuaaugu

SEQ ID NO: 1379260 - RNA, 19 nt, Human
uuuccacagagcuguuccu

SEQ ID NO: 1379261 - RNA, 21 nt, Human
uuuugcauucuuguagcagcu

SEQ ID NO: 1379262 - RNA, 23 nt, Human
aacaagaauacuuagaauucgua

SEQ ID NO: 1379263 - RNA, 22 nt, Human
aagcaggaagagaaugaacaug

SEQ ID NO: 1379264 - RNA, 27 nt, Human
aagcaggaagagaaugaacaugucuga

SEQ ID NO: 1379265 - RNA, 23 nt, Human
aagcaggaagagaaugaagggac

SEQ ID NO: 1379266 - RNA, 22 nt, Human
aaguauuuucugagagccaccc

SEQ ID NO: 1379267 - RNA, 20 nt, Human
aggccugaugauaaacagga

SEQ ID NO: 1379268 - RNA, 19 nt, Human
aggcuaauuaagugcaaca

SEQ ID NO: 1379269 - RNA, 18 nt, Human
auacaacauaugacugcc

SEQ ID NO: 1379270 - RNA, 21 nt, Human
auccucagugaucaucaaucc

SEQ ID NO: 1379271 - RNA, 24 nt, Human
augggauccagcagaaacugggcu

SEQ ID NO: 1379272 - RNA, 20 nt, Human
caaagcaguagacugugcua

SEQ ID NO: 1379273 - RNA, 18 nt, Human
caagacaaggccugauga

SEQ ID NO: 1379274 - RNA, 19 nt, Human
cagcagaaacugggcucug

SEQ ID NO: 1379275 - RNA, 20 nt, Human
ccagagcagaagcaggaaga

SEQ ID NO: 1379276 - RNA, 22 nt, Human
cccaccggcccagagcagaagc

SEQ ID NO: 1379277 - RNA, 19 nt, Human
cggcccagagcagaagcag

SEQ ID NO: 1379278 - RNA, 20 nt, Human
cuccuaagaugaggagcagg

SEQ ID NO: 1379279 - RNA, 20 nt, Human
cuggaguauugcuggcccca

SEQ ID NO: 1379280 - RNA, 18 nt, Human
gacgacucacaggcaaaa

SEQ ID NO: 1379281 - RNA, 21 nt, Human
gagaaugaacaugucugagug

SEQ ID NO: 1379282 - RNA, 24 nt, Human
gagacuccuaagaugaggagcagg

SEQ ID NO: 1379283 - RNA, 21 nt, Human
gaguguuccccuggaaggcug

SEQ ID NO: 1379284 - RNA, 21 nt, Human
gggauccagcagaaacugggc

SEQ ID NO: 1379285 - RNA, 18 nt, Human
uaucagaguuuuaaaaug

SEQ ID NO: 1379286 - RNA, 20 nt, Human
uauccaagacaaggccugau

SEQ ID NO: 1379287 - RNA, 18 nt, Human
uaugugcaauuuauucac

SEQ ID NO: 1379288 - RNA, 22 nt, Human
uauucacgauacaacauaugac

SEQ ID NO: 1379289 - RNA, 22 nt, Human
uauuugaaaaggagacuccuaa

SEQ ID NO: 1379290 - RNA, 25 nt, Human
uauuugaaaaggagacuccuaagau

SEQ ID NO: 1379291 - RNA, 21 nt, Human
ucagaguuuuaaaaugggaac

SEQ ID NO: 1379292 - RNA, 20 nt, Human
ucccaaugugccacccaugg

SEQ ID NO: 1379293 - RNA, 20 nt, Human
uccccuggaaggcugggccu

SEQ ID NO: 1379294 - RNA, 22 nt, Human
ucccuuggcaacaucaagucaa

SEQ ID NO: 1379295 - RNA, 26 nt, Human
uccuuugugguuguuauuccuuccaa

SEQ ID NO: 1379296 - RNA, 18 nt, Human
ugagagccacccaccggc

SEQ ID NO: 1379297 - RNA, 20 nt, Human
ugagagccacccaccggccc

SEQ ID NO: 1379298 - RNA, 22 nt, Human
ugaggauauacaggcuaauuaa

SEQ ID NO: 1379299 - RNA, 20 nt, Human
ugauauccaagacaaggccc

SEQ ID NO: 1379300 - RNA, 20 nt, Human
ugccaauggccucagucccu

SEQ ID NO: 1379301 - RNA, 23 nt, Human
ugcuaugagagccgguaaugagg

SEQ ID NO: 1379302 - RNA, 22 nt, Human
uggaaggcugggccuuacaagg

SEQ ID NO: 1379303 - RNA, 23 nt, Human
uggaaggcugggccuuacaagga

SEQ ID NO: 1379304 - RNA, 24 nt, Human
ugggaacagagccuaauuauuuga

SEQ ID NO: 1379305 - RNA, 21 nt, Human
ugggggagggagagaaguccc

SEQ ID NO: 1379306 - RNA, 24 nt, Human
uggguagcuacuaugugcaauuua

SEQ ID NO: 1379307 - RNA, 21 nt, Human
uuccccuggaaggcugggccu

SEQ ID NO: 1379308 - RNA, 19 nt, Human
uugcuggguagcuacuaug

SEQ ID NO: 1379309 - RNA, 23 nt, Human
uuugccagcagcaaguauuuucu

SEQ ID NO: 1379310 - RNA, 20 nt, Human
uuuuuuuuuuuuuuuuugcu

SEQ ID NO: 1379311 - RNA, 23 nt, Human
uuuuuuuuuuuuuuuuuugcugg

SEQ ID NO: 1379312 - RNA, 25 nt, Human
uuuuuuuuuuuuuuuuuuugcuggg

SEQ ID NO: 1379313 - RNA, 27 nt, Human
uuuuuuuuuuuuuuuuuuuuuuugggg

SEQ ID NO: 1379314 - RNA, 22 nt, Human
aagcaccuguaacuccaggaag

SEQ ID NO: 1379315 - RNA, 25 nt, Human
aagggccuucccaagucguuucgcc

SEQ ID NO: 1379316 - RNA, 21 nt, Human
aagugauccgccugccucggc

SEQ ID NO: 1379317 - RNA, 24 nt, Human
aagugauccgccugccucggccuc

SEQ ID NO: 1379318 - RNA, 23 nt, Human
aaugcaguuuauagcuauacauu

SEQ ID NO: 1379319 - RNA, 21 nt, Human
acagcaacaagaaacuggccu

SEQ ID NO: 1379320 - RNA, 22 nt, Human
acagcaacaagaaacuggccua

SEQ ID NO: 1379321 - RNA, 24 nt, Human
accacccugggcggccccuccaaa

SEQ ID NO: 1379322 - RNA, 24 nt, Human
accauguuggccaggcuggucucg

SEQ ID NO: 1379323 - RNA, 22 nt, Human
accccgaaagggccuucccaag

SEQ ID NO: 1379324 - RNA, 22 nt, Human
accuguaacuccaggaagauuc

SEQ ID NO: 1379325 - RNA, 19 nt, Human
acgcgcugcuggcgcugaa

SEQ ID NO: 1379326 - RNA, 26 nt, Human
acgcgcugcuggcgcugaaggaagug

SEQ ID NO: 1379327 - RNA, 18 nt, Human
acgggguuucaccauguu

SEQ ID NO: 1379328 - RNA, 23 nt, Human
acgggguuucaccauguuggcca

SEQ ID NO: 1379329 - RNA, 24 nt, Human
acgggguuucaccauguuggccag

SEQ ID NO: 1379330 - RNA, 20 nt, Human
agacgcccucaaggacaggg

SEQ ID NO: 1379331 - RNA, 24 nt, Human
agagugcagccucugccucccggg

SEQ ID NO: 1379332 - RNA, 24 nt, Human
agcgauucuccuuccucagccucc

SEQ ID NO: 1379333 - RNA, 20 nt, Human
aggaagacgcuggagcgucu

SEQ ID NO: 1379334 - RNA, 21 nt, Human
aguagcugggauuacagacau

SEQ ID NO: 1379335 - RNA, 21 nt, Human
agugcagccucugccucccgg

SEQ ID NO: 1379336 - RNA, 19 nt, Human
augacaagaacaucaggaa

SEQ ID NO: 1379337 - RNA, 21 nt, Human
caaaagacgcccucaaggaca

SEQ ID NO: 1379338 - RNA, 24 nt, Human
caacacguggcccagcaaaaggag

SEQ ID NO: 1379339 - RNA, 28 nt, Human
caaccacgcccgcccgcgcagcugcaga

SEQ ID NO: 1379340 - RNA, 20 nt, Human
caccacccagcccgcgcucc

SEQ ID NO: 1379341 - RNA, 21 nt, Human
caccacccagcccgcgcuccg

SEQ ID NO: 1379342 - RNA, 21 nt, Human
caccacguccagcuaauuuuu

SEQ ID NO: 1379343 - RNA, 21 nt, Human
caccauguuggccaggcuggu

SEQ ID NO: 1379344 - RNA, 24 nt, Human
caccauguuggccaggcuggucuc

SEQ ID NO: 1379345 - RNA, 27 nt, Human
caccauguuggccaggcuggucucgaa

SEQ ID NO: 1379346 - RNA, 20 nt, Human
cacgacgguuaaaauaauuu

SEQ ID NO: 1379347 - RNA, 21 nt, Human
cacgugcuguuugagcacgcg

SEQ ID NO: 1379348 - RNA, 19 nt, Human
cagcugcagaggccggaaa

SEQ ID NO: 1379349 - RNA, 24 nt, Human
cauguuggccaggcuggucucgaa

SEQ ID NO: 1379350 - RNA, 23 nt, Human
ccacccagcccgcgcuccgggcg

SEQ ID NO: 1379351 - RNA, 23 nt, Human
ccacccugggcggccccuccaaa

SEQ ID NO: 1379352 - RNA, 19 nt, Human
ccccggcaaccacgcccgc

SEQ ID NO: 1379353 - RNA, 19 nt, Human
cccgaguagcugggauuac

SEQ ID NO: 1379354 - RNA, 21 nt, Human
cccgcgcagcugcagaggccg

SEQ ID NO: 1379355 - RNA, 20 nt, Human
cccggguucaagcgauucuc

SEQ ID NO: 1379356 - RNA, 22 nt, Human
ccgaacccgggagcuggcgcca

SEQ ID NO: 1379357 - RNA, 24 nt, Human
ccgaguagcugggauuacagacau

SEQ ID NO: 1379358 - RNA, 20 nt, Human
ccggcucccguuccaggugc

SEQ ID NO: 1379359 - RNA, 22 nt, Human
ccucagccucccgaguagcugg

SEQ ID NO: 1379360 - RNA, 24 nt, Human
ccucccggguucaagcgauucucc

SEQ ID NO: 1379361 - RNA, 21 nt, Human
ccugaucuuaagugauccgcc

SEQ ID NO: 1379362 - RNA, 21 nt, Human
ccugcccugggaacggguucc

SEQ ID NO: 1379363 - RNA, 20 nt, Human
ccugcgccugcgccugcgcc

SEQ ID NO: 1379364 - RNA, 18 nt, Human
ccuugcucuguugcccag

SEQ ID NO: 1379365 - RNA, 19 nt, Human
ccuugcucuguugcccagg

SEQ ID NO: 1379366 - RNA, 23 nt, Human
ccuugcucuguugcccaggcuag

SEQ ID NO: 1379367 - RNA, 24 nt, Human
ccuugcucuguugcccaggcuaga

SEQ ID NO: 1379368 - RNA, 21 nt, Human
cgagccgaacccgggagcugg

SEQ ID NO: 1379369 - RNA, 25 nt, Human
cgagccgaacccgggagcuggcgcc

SEQ ID NO: 1379370 - RNA, 23 nt, Human
cgcagacagggccugggccuggg

SEQ ID NO: 1379371 - RNA, 19 nt, Human
cgccugcccugggaacggg

SEQ ID NO: 1379372 - RNA, 22 nt, Human
cgccugcgccugcccugggaac

SEQ ID NO: 1379373 - RNA, 20 nt, Human
cgcucgcccgcgcucggcac

SEQ ID NO: 1379374 - RNA, 21 nt, Human
cggcaccacccagcccgcgcu

SEQ ID NO: 1379375 - RNA, 19 nt, Human
cgggagcuggcgccauggu

SEQ ID NO: 1379376 - RNA, 21 nt, Human
cgggggccgcgcguccccggc

SEQ ID NO: 1379377 - RNA, 23 nt, Human
cgggggggcgggggcguggccuc

SEQ ID NO: 1379378 - RNA, 24 nt, Human
cgggguuucaccauguuggccagg

SEQ ID NO: 1379379 - RNA, 23 nt, Human
cucagccucccgaguagcuggga

SEQ ID NO: 1379380 - RNA, 18 nt, Human
cucagcgaucaccagcgc

SEQ ID NO: 1379381 - RNA, 23 nt, Human
cucagcgaucaccagcgcccaga

SEQ ID NO: 1379382 - RNA, 20 nt, Human
cucuguugcccaggcuagag

SEQ ID NO: 1379383 - RNA, 20 nt, Human
cugcugcagccgcagguggg

SEQ ID NO: 1379384 - RNA, 23 nt, Human
cuuaagugauccgccugccucgg

SEQ ID NO: 1379385 - RNA, 23 nt, Human
cuuccucagccucccgaguagcu

SEQ ID NO: 1379386 - RNA, 21 nt, Human
gacuucuugcuugaaaacccc

SEQ ID NO: 1379387 - RNA, 24 nt, Human
gagacgggguuucaccauguuggc

SEQ ID NO: 1379388 - RNA, 24 nt, Human
gagauggugucguccccggccucc

SEQ ID NO: 1379389 - RNA, 24 nt, Human
gaguagcugggauuacagacaugc

SEQ ID NO: 1379390 - RNA, 24 nt, Human
gaucuuaagugauccgccugccuc

SEQ ID NO: 1379391 - RNA, 24 nt, Human
gcgcagcugcagaggccggaaaag

SEQ ID NO: 1379392 - RNA, 19 nt, Human
gcgcugaaggaaguggagg

SEQ ID NO: 1379393 - RNA, 22 nt, Human
gcuagagugcagccucugccuc

SEQ ID NO: 1379394 - RNA, 25 nt, Human
gcucuguugcccaggcuagagugca

SEQ ID NO: 1379395 - RNA, 18 nt, Human
ggaaguggaggagaucag

SEQ ID NO: 1379396 - RNA, 18 nt, Human
ggacuauuaccccgaaag

SEQ ID NO: 1379397 - RNA, 23 nt, Human
ggcuggucucgaacuccugaucu

SEQ ID NO: 1379398 - RNA, 23 nt, Human
gggguuucaccauguuggccagg

SEQ ID NO: 1379399 - RNA, 21 nt, Human
gggguuucggccugcguucgg

SEQ ID NO: 1379400 - RNA, 19 nt, Human
guagagacgggguuucacc

SEQ ID NO: 1379401 - RNA, 21 nt, Human
guagagacgggguuucaccau

SEQ ID NO: 1379402 - RNA, 22 nt, Human
guagagacgggguuucaccaug

SEQ ID NO: 1379403 - RNA, 23 nt, Human
guagagacgggguuucaccaugu

SEQ ID NO: 1379404 - RNA, 22 nt, Human
guagcugggauuacagacaugc

SEQ ID NO: 1379405 - RNA, 21 nt, Human
gugcagccucugccucccggg

SEQ ID NO: 1379406 - RNA, 20 nt, Human
gugggcuccuuuggcggccc

SEQ ID NO: 1379407 - RNA, 18 nt, Human
gugggugagauccguggg

SEQ ID NO: 1379408 - RNA, 23 nt, Human
uaaagcaaaacucauuucuaaag

SEQ ID NO: 1379409 - RNA, 24 nt, Human
uaauuuuuuuauuuuuugguagag

SEQ ID NO: 1379410 - RNA, 25 nt, Human
uaauuuuuuuauuuuuugguagaga

SEQ ID NO: 1379411 - RNA, 22 nt, Human
uagagacgggguuucaccaugu

SEQ ID NO: 1379412 - RNA, 21 nt, Human
uaggaagacgcuggagcgucu

SEQ ID NO: 1379413 - RNA, 23 nt, Human
ucaaucgcuuaacaaaauaacaa

SEQ ID NO: 1379414 - RNA, 20 nt, Human
ucagccucccgaguagcugg

SEQ ID NO: 1379415 - RNA, 24 nt, Human
ucagggccgcccaagcggaggagc

SEQ ID NO: 1379416 - RNA, 21 nt, Human
ucagucugcugcagccgcagg

SEQ ID NO: 1379417 - RNA, 19 nt, Human
uccccggcaaccacgcccg

SEQ ID NO: 1379418 - RNA, 23 nt, Human
uccccuucgaaugacucuuuaaa

SEQ ID NO: 1379419 - RNA, 18 nt, Human
ucccgaguagcugggauu

SEQ ID NO: 1379420 - RNA, 21 nt, Human
ucccggguucaagcgauucuc

SEQ ID NO: 1379421 - RNA, 23 nt, Human
ucccggguucaagcgauucuccu

SEQ ID NO: 1379422 - RNA, 22 nt, Human
uccuaaagugcuggauuauagc

SEQ ID NO: 1379423 - RNA, 22 nt, Human
ucggcaccacccagcccgcgcu

SEQ ID NO: 1379424 - RNA, 18 nt, Human
ucggccuccuaaagugcu

SEQ ID NO: 1379425 - RNA, 25 nt, Human
ucgggggggcgggggcguggccucu

SEQ ID NO: 1379426 - RNA, 21 nt, Human
ucucgaacuccugaucuuaag

SEQ ID NO: 1379427 - RNA, 18 nt, Human
ucuguugcccaggcuaga

SEQ ID NO: 1379428 - RNA, 24 nt, Human
ucuguugcccaggcuagagugcag

SEQ ID NO: 1379429 - RNA, 18 nt, Human
ugaaggaaguggaggaga

SEQ ID NO: 1379430 - RNA, 19 nt, Human
ugacaagaacaucaggaac

SEQ ID NO: 1379431 - RNA, 18 nt, Human
ugaucuuaagugauccgc

SEQ ID NO: 1379432 - RNA, 24 nt, Human
ugaucuuaagugauccgccugccu

SEQ ID NO: 1379433 - RNA, 18 nt, Human
ugcagccgcaggugggug

SEQ ID NO: 1379434 - RNA, 18 nt, Human
ugcagccucugccucccg

SEQ ID NO: 1379435 - RNA, 20 nt, Human
ugcagccucugccucccggg

SEQ ID NO: 1379436 - RNA, 23 nt, Human
ugcagccucugccucccggguuc

SEQ ID NO: 1379437 - RNA, 24 nt, Human
ugcccaaaagacgcccucaaggac

SEQ ID NO: 1379438 - RNA, 26 nt, Human
ugcccaggcuagagugcagccucugc

SEQ ID NO: 1379439 - RNA, 24 nt, Human
ugccucggccuccuaaagugcugg

SEQ ID NO: 1379440 - RNA, 18 nt, Human
ugcuccaccacguccagc

SEQ ID NO: 1379441 - RNA, 18 nt, Human
ugcuguugcacgugcugu

SEQ ID NO: 1379442 - RNA, 24 nt, Human
uggccaggcuggucucgaacuccu

SEQ ID NO: 1379443 - RNA, 24 nt, Human
uggccucuggagccugguuccucc

SEQ ID NO: 1379444 - RNA, 21 nt, Human
uggcgcugaaggaaguggagg

SEQ ID NO: 1379445 - RNA, 24 nt, Human
ugggauuacagacaugcuccacca

SEQ ID NO: 1379446 - RNA, 23 nt, Human
ugguagagacgggguuucaccau

SEQ ID NO: 1379447 - RNA, 24 nt, Human
ugguagagacgggguuucaccaug

SEQ ID NO: 1379448 - RNA, 22 nt, Human
uguugcacgugcuguuugagca

SEQ ID NO: 1379449 - RNA, 21 nt, Human
uguugcccaggcuagagugca

SEQ ID NO: 1379450 - RNA, 21 nt, Human
uuaagugauccgccugccucg

SEQ ID NO: 1379451 - RNA, 21 nt, Human
uuacagacaugcuccaccacg

SEQ ID NO: 1379452 - RNA, 23 nt, Human
uucaagcgauucuccuuccucag

SEQ ID NO: 1379453 - RNA, 24 nt, Human
uucaagcgauucuccuuccucagc

SEQ ID NO: 1379454 - RNA, 24 nt, Human
uugguagagacgggguuucaccau

SEQ ID NO: 1379455 - RNA, 24 nt, Human
uuucaccauguuggccaggcuggu

SEQ ID NO: 1379456 - RNA, 24 nt, Human
uuuuugguagagacgggguuucac

SEQ ID NO: 1379457 - RNA, 23 nt, Human
uuuuuugguagagacgggguuuc

SEQ ID NO: 1379458 - RNA, 24 nt, Human
uuuuuuuauuuuuugguagagacg

SEQ ID NO: 1379459 - RNA, 18 nt, Human
aaaacagaacagaaagaa

SEQ ID NO: 1379460 - RNA, 24 nt, Human
aaagugcugggauuauaggcauga

SEQ ID NO: 1379461 - RNA, 27 nt, Human
aacauuauuucucccccccaccccccg

SEQ ID NO: 1379462 - RNA, 20 nt, Human
aaccuccaucuccugggcuc

SEQ ID NO: 1379463 - RNA, 22 nt, Human
aaguagcugggauuacaggugc

SEQ ID NO: 1379464 - RNA, 19 nt, Human
aagugcugggauuauaggc

SEQ ID NO: 1379465 - RNA, 21 nt, Human
aagugcugggauuauaggcau

SEQ ID NO: 1379466 - RNA, 22 nt, Human
acacgucauucgcauaggaaau

SEQ ID NO: 1379467 - RNA, 21 nt, Human
acacugaagcuguaacagcau

SEQ ID NO: 1379468 - RNA, 19 nt, Human
acaggguuucuucauguug

SEQ ID NO: 1379469 - RNA, 24 nt, Human
acaggguuucuucauguuggucag

SEQ ID NO: 1379470 - RNA, 22 nt, Human
acauuauuucucccccccaccc

SEQ ID NO: 1379471 - RNA, 19 nt, Human
accauggguacagggauac

SEQ ID NO: 1379472 - RNA, 24 nt, Human
acugccucagccucccaaagugcu

SEQ ID NO: 1379473 - RNA, 18 nt, Human
agacaggguuucuucaug

SEQ ID NO: 1379474 - RNA, 23 nt, Human
aggcaugagauaccgugccuggc

SEQ ID NO: 1379475 - RNA, 20 nt, Human
agugcaguggcaugaucuug

SEQ ID NO: 1379476 - RNA, 23 nt, Human
agugcaguggcaugaucuuggcu

SEQ ID NO: 1379477 - RNA, 24 nt, Human
agugcaguggcaugaucuuggcuc

SEQ ID NO: 1379478 - RNA, 24 nt, Human
aguggcaugaucuuggcucacugc

SEQ ID NO: 1379479 - RNA, 21 nt, Human
auaaaugucaauuaaagcucc

SEQ ID NO: 1379480 - RNA, 21 nt, Human
auuacaggugccugccaccau

SEQ ID NO: 1379481 - RNA, 18 nt, Human
auuauuucucccccccac

SEQ ID NO: 1379482 - RNA, 24 nt, Human
caaagugcugggauuauaggcaug

SEQ ID NO: 1379483 - RNA, 23 nt, Human
caaccuccaucuccugggcucaa

SEQ ID NO: 1379484 - RNA, 24 nt, Human
caaccuccaucuccugggcucaag

SEQ ID NO: 1379485 - RNA, 22 nt, Human
caagagagcacaaaacagaaca

SEQ ID NO: 1379486 - RNA, 22 nt, Human
caagugaaacuacuuauguaga

SEQ ID NO: 1379487 - RNA, 24 nt, Human
caccauguccggcuaauuuuugua

SEQ ID NO: 1379488 - RNA, 23 nt, Human
cacccaggagauucucauucagc

SEQ ID NO: 1379489 - RNA, 23 nt, Human
cacugcaaccuccaucuccuggg

SEQ ID NO: 1379490 - RNA, 24 nt, Human
caggguuucuucauguuggucagg

SEQ ID NO: 1379491 - RNA, 21 nt, Human
caggugccugccaccaugucc

SEQ ID NO: 1379492 - RNA, 23 nt, Human
caggugccugccaccauguccgg

SEQ ID NO: 1379493 - RNA, 24 nt, Human
ccaaagugcugggauuauaggcau

SEQ ID NO: 1379494 - RNA, 21 nt, Human
ccaaguagcugggauuacagg

SEQ ID NO: 1379495 - RNA, 20 nt, Human
ccaggagauucucauucagc

SEQ ID NO: 1379496 - RNA, 23 nt, Human
cccaaguagcugggauuacaggu

SEQ ID NO: 1379497 - RNA, 24 nt, Human
cccaaguagcugggauuacaggug

SEQ ID NO: 1379498 - RNA, 23 nt, Human
cccagucuggagugcaguggcau

SEQ ID NO: 1379499 - RNA, 22 nt, Human
ccccaccccccgcuauacuaaa

SEQ ID NO: 1379500 - RNA, 20 nt, Human
ccccccaccccccgcuauac

SEQ ID NO: 1379501 - RNA, 23 nt, Human
ccccccaccccccgcuauacuaa

SEQ ID NO: 1379502 - RNA, 19 nt, Human
ccccggggccgcgccgagg

SEQ ID NO: 1379503 - RNA, 22 nt, Human
cccgggggccucucgggagcuc

SEQ ID NO: 1379504 - RNA, 19 nt, Human
ccuccaucuccugggcuca

SEQ ID NO: 1379505 - RNA, 22 nt, Human
ccucucggggacccagaccgga

SEQ ID NO: 1379506 - RNA, 23 nt, Human
ccugacucagccucccaaguagc

SEQ ID NO: 1379507 - RNA, 23 nt, Human
ccugggcucaagcaauucuccug

SEQ ID NO: 1379508 - RNA, 21 nt, Human
ccuggucucaacugccucagc

SEQ ID NO: 1379509 - RNA, 19 nt, Human
cggaaaggcggcccuccug

SEQ ID NO: 1379510 - RNA, 23 nt, Human
cucaacugccucagccucccaaa

SEQ ID NO: 1379511 - RNA, 24 nt, Human
cucaagcaauucuccugacucagc

SEQ ID NO: 1379512 - RNA, 24 nt, Human
cucacugcaaccuccaucuccugg

SEQ ID NO: 1379513 - RNA, 24 nt, Human
cucagccucccaaguagcugggau

SEQ ID NO: 1379514 - RNA, 26 nt, Human
cuccucuacuaaaaggcucucccaaa

SEQ ID NO: 1379515 - RNA, 21 nt, Human
cuccugggcucaagcaauucu

SEQ ID NO: 1379516 - RNA, 19 nt, Human
cugaagcuguaacagcauc

SEQ ID NO: 1379517 - RNA, 23 nt, Human
cugcaaccuccaucuccugggcu

SEQ ID NO: 1379518 - RNA, 24 nt, Human
cugcaaccuccaucuccugggcuc

SEQ ID NO: 1379519 - RNA, 24 nt, Human
cugccucagccucccaaagugcug

SEQ ID NO: 1379520 - RNA, 24 nt, Human
cuggagugcaguggcaugaucuug

SEQ ID NO: 1379521 - RNA, 24 nt, Human
cuggucucaacugccucagccucc

SEQ ID NO: 1379522 - RNA, 24 nt, Human
cuucauguuggucaggcuggacuc

SEQ ID NO: 1379523 - RNA, 18 nt, Human
gagagcacaaaacagaac

SEQ ID NO: 1379524 - RNA, 22 nt, Human
gagagcacaaaacagaacagaa

SEQ ID NO: 1379525 - RNA, 18 nt, Human
gauuacaggugccugcca

SEQ ID NO: 1379526 - RNA, 24 nt, Human
gauuacaggugccugccaccaugu

SEQ ID NO: 1379527 - RNA, 24 nt, Human
gauuauaggcaugagauaccgugc

SEQ ID NO: 1379528 - RNA, 21 nt, Human
gccgcgccgaggggacaggug

SEQ ID NO: 1379529 - RNA, 21 nt, Human
gcucucccaaaagagacacag

SEQ ID NO: 1379530 - RNA, 24 nt, Human
ggcuggacucgaacuccuggucuc

SEQ ID NO: 1379531 - RNA, 21 nt, Human
gggaaaugcauccauugcccc

SEQ ID NO: 1379532 - RNA, 18 nt, Human
guagcugggauuacaggu

SEQ ID NO: 1379533 - RNA, 21 nt, Human
gucaauuaaagcuccuuuaag

SEQ ID NO: 1379534 - RNA, 22 nt, Human
gucucaacugccucagccuccc

SEQ ID NO: 1379535 - RNA, 25 nt, Human
uaacauuauuucucccccccacccc

SEQ ID NO: 1379536 - RNA, 24 nt, Human
uaauuuuuguauuuuuaguacaga

SEQ ID NO: 1379537 - RNA, 26 nt, Human
uaggaggcuuaaaacacaauuauuca

SEQ ID NO: 1379538 - RNA, 24 nt, Human
uaguacagacaggguuucuucaug

SEQ ID NO: 1379539 - RNA, 24 nt, Human
ucacugcaaccuccaucuccuggg

SEQ ID NO: 1379540 - RNA, 25 nt, Human
ucacugcaaccuccaucuccugggc

SEQ ID NO: 1379541 - RNA, 27 nt, Human
ucacugcaaccuccaucuccugggcuc

SEQ ID NO: 1379542 - RNA, 20 nt, Human
ucagccucccaaguagcugg

SEQ ID NO: 1379543 - RNA, 24 nt, Human
ucccaaagugcugggauuauaggc

SEQ ID NO: 1379544 - RNA, 23 nt, Human
ucccaaguagcugggauuacagg

SEQ ID NO: 1379545 - RNA, 23 nt, Human
ucccccccaccccccgcuauacu

SEQ ID NO: 1379546 - RNA, 18 nt, Human
uccccggggccgcgccga

SEQ ID NO: 1379547 - RNA, 21 nt, Human
ucccgggggccucucgggagc

SEQ ID NO: 1379548 - RNA, 22 nt, Human
uccuggacaggugacacacacu

SEQ ID NO: 1379549 - RNA, 21 nt, Human
uccugggcucaagcaauucuc

SEQ ID NO: 1379550 - RNA, 22 nt, Human
uccugggcucaagcaauucucc

SEQ ID NO: 1379551 - RNA, 24 nt, Human
uccugggcucaagcaauucuccug

SEQ ID NO: 1379552 - RNA, 24 nt, Human
ucucccucuguugcccagucugga

SEQ ID NO: 1379553 - RNA, 24 nt, Human
ucuccugggcucaagcaauucucc

SEQ ID NO: 1379554 - RNA, 20 nt, Human
ucucggggacccagaccgga

SEQ ID NO: 1379555 - RNA, 24 nt, Human
ucuguugcccagucuggagugcag

SEQ ID NO: 1379556 - RNA, 24 nt, Human
ugacucagccucccaaguagcugg

SEQ ID NO: 1379557 - RNA, 22 nt, Human
ugagacggagucucccucuguu

SEQ ID NO: 1379558 - RNA, 25 nt, Human
ugcaaccuccaucuccugggcucaa

SEQ ID NO: 1379559 - RNA, 22 nt, Human
ugcaguggcaugaucuuggcuc

SEQ ID NO: 1379560 - RNA, 24 nt, Human
ugccucagccucccaaagugcugg

SEQ ID NO: 1379561 - RNA, 19 nt, Human
uggagugcaguggcaugau

SEQ ID NO: 1379562 - RNA, 24 nt, Human
uggagugcaguggcaugaucuugg

SEQ ID NO: 1379563 - RNA, 19 nt, Human
uggcaugaucuuggcucac

SEQ ID NO: 1379564 - RNA, 21 nt, Human
uggcaugaucuuggcucacug

SEQ ID NO: 1379565 - RNA, 21 nt, Human
ugggauuacaggugccugcca

SEQ ID NO: 1379566 - RNA, 22 nt, Human
ugggauuacaggugccugccac

SEQ ID NO: 1379567 - RNA, 24 nt, Human
ugggauuacaggugccugccacca

SEQ ID NO: 1379568 - RNA, 25 nt, Human
ugggauuacaggugccugccaccau

SEQ ID NO: 1379569 - RNA, 18 nt, Human
ugggauuauaggcaugag

SEQ ID NO: 1379570 - RNA, 19 nt, Human
ugggauuauaggcaugaga

SEQ ID NO: 1379571 - RNA, 22 nt, Human
ugggauuauaggcaugagauac

SEQ ID NO: 1379572 - RNA, 23 nt, Human
ugggauuauaggcaugagauacc

SEQ ID NO: 1379573 - RNA, 23 nt, Human
ugggauuauaggcaugagauacc

SEQ ID NO: 1379574 - RNA, 24 nt, Human
ugggauuauaggcaugagauaccg

SEQ ID NO: 1379575 - RNA, 24 nt, Human
uggucaggcuggacucgaacuccu

SEQ ID NO: 1379576 - RNA, 19 nt, Human
uguagagacucauauaaga

SEQ ID NO: 1379577 - RNA, 24 nt, Human
uuaguacagacaggguuucuucau

SEQ ID NO: 1379578 - RNA, 18 nt, Human
uucauguuggucaggcug

SEQ ID NO: 1379579 - RNA, 22 nt, Human
uucucccccccaccccccgcua

SEQ ID NO: 1379580 - RNA, 24 nt, Human
uugcccagucuggagugcaguggc

SEQ ID NO: 1379581 - RNA, 20 nt, Human
uuuacuuuuacuuaggaggc

SEQ ID NO: 1379582 - RNA, 21 nt, Human
uuucuucauguuggucaggcu

SEQ ID NO: 1379583 - RNA, 22 nt, Human
uuuguuaacuucugaacuuggu

SEQ ID NO: 1379584 - RNA, 20 nt, Human
uuuuuguauuuuuaguacag

SEQ ID NO: 1379585 - RNA, 23 nt, Human
uuuuuguauuuuuaguacagaca

SEQ ID NO: 1379586 - RNA, 23 nt, Human
aaaaacaacaacaaaaaccaaag

SEQ ID NO: 1379587 - RNA, 19 nt, Human
aaaaacagagagaggaagg

SEQ ID NO: 1379588 - RNA, 19 nt, Human
aaaaaccaaagagcuguaa

SEQ ID NO: 1379589 - RNA, 21 nt, Human
aaaacguaaaaacaacaacaa

SEQ ID NO: 1379590 - RNA, 22 nt, Human
aaaauagguuauuuaaaaaugu

SEQ ID NO: 1379591 - RNA, 19 nt, Human
aaacaacaacaaaaaccaa

SEQ ID NO: 1379592 - RNA, 24 nt, Human
aaacaacaacaaaaaccaaagagc

SEQ ID NO: 1379593 - RNA, 26 nt, Human
aaacaacaacaaaaaccaaagagcug

SEQ ID NO: 1379594 - RNA, 21 nt, Human
aaacagaauaugccgggccca

SEQ ID NO: 1379595 - RNA, 20 nt, Human
aaaguacugggauuauaggc

SEQ ID NO: 1379596 - RNA, 22 nt, Human
aaaguacugggauuauaggcga

SEQ ID NO: 1379597 - RNA, 24 nt, Human
aaagugcugggauuacaggcauga

SEQ ID NO: 1379598 - RNA, 24 nt, Human
aaagugcugggauuacaggcguga

SEQ ID NO: 1379599 - RNA, 19 nt, Human
aaaucaggcacaaaaagac

SEQ ID NO: 1379600 - RNA, 23 nt, Human
aacagaaugagaccugucucuga

SEQ ID NO: 1379601 - RNA, 24 nt, Human
aacaucuuuuaucuuuuuuuuuuu

SEQ ID NO: 1379602 - RNA, 26 nt, Human
aacuauaggagcaaaugugaaggaaa

SEQ ID NO: 1379603 - RNA, 24 nt, Human
aagaagcugggauuauaggcgccu

SEQ ID NO: 1379604 - RNA, 25 nt, Human
aagcaauccucccacuucagccucc

SEQ ID NO: 1379605 - RNA, 18 nt, Human
aaguacugggauuauagg

SEQ ID NO: 1379606 - RNA, 19 nt, Human
aagugcugggauuacaggc

SEQ ID NO: 1379607 - RNA, 19 nt, Human
aagugcugggauuacaggc

SEQ ID NO: 1379608 - RNA, 19 nt, Human
aagugcugggauuacaggc

SEQ ID NO: 1379609 - RNA, 21 nt, Human
aagugcugggauuacaggcau

SEQ ID NO: 1379610 - RNA, 26 nt, Human
aagugcugggauuacaggcaugagcc

SEQ ID NO: 1379611 - RNA, 26 nt, Human
aagugcugggauuacaggcgugagcc

SEQ ID NO: 1379612 - RNA, 19 nt, Human
aaugaucuacccaccuugg

SEQ ID NO: 1379613 - RNA, 19 nt, Human
aauggaacacaccaacaaa

SEQ ID NO: 1379614 - RNA, 24 nt, Human
aaugggauuugccauguuggccag

SEQ ID NO: 1379615 - RNA, 27 nt, Human
acaaaaaccaaagagcuguaauaaaug

SEQ ID NO: 1379616 - RNA, 23 nt, Human
acaacaacaaaaaccaaagagcu

SEQ ID NO: 1379617 - RNA, 18 nt, Human
acagaauaugccgggccc

SEQ ID NO: 1379618 - RNA, 21 nt, Human
acagaauguacaaugaagccc

SEQ ID NO: 1379619 - RNA, 18 nt, Human
acagacaugcaucaccau

SEQ ID NO: 1379620 - RNA, 21 nt, Human
acagagccagaguccugucag

SEQ ID NO: 1379621 - RNA, 23 nt, Human
acagagccagaguccugucagug

SEQ ID NO: 1379622 - RNA, 18 nt, Human
accauguuggccaggcug

SEQ ID NO: 1379623 - RNA, 23 nt, Human
accucaaccuuccaaagugcugg

SEQ ID NO: 1379624 - RNA, 19 nt, Human
acugcaaccuccgcccccu

SEQ ID NO: 1379625 - RNA, 23 nt, Human
acuucagccuccugaguggcugg

SEQ ID NO: 1379626 - RNA, 24 nt, Human
acuucagccuccugaguggcuggg

SEQ ID NO: 1379627 - RNA, 21 nt, Human
agaaacagagccagaguccug

SEQ ID NO: 1379628 - RNA, 27 nt, Human
agacacuguccuccugcagcuucuuuc

SEQ ID NO: 1379629 - RNA, 22 nt, Human
agagaagcacagcagagcccca

SEQ ID NO: 1379630 - RNA, 24 nt, Human
agagaucugcccaccucaaccuuc

SEQ ID NO: 1379631 - RNA, 25 nt, Human
agcaauccucccacuucagccuccu

SEQ ID NO: 1379632 - RNA, 20 nt, Human
aggaggaggucaaggcugcc

SEQ ID NO: 1379633 - RNA, 20 nt, Human
aggcagaacagucaaaaaca

SEQ ID NO: 1379634 - RNA, 19 nt, Human
aggcagguuggacugcuuc

SEQ ID NO: 1379635 - RNA, 21 nt, Human
aggcgagagccaccacgccca

SEQ ID NO: 1379636 - RNA, 20 nt, Human
aggcgccugccaccacgccc

SEQ ID NO: 1379637 - RNA, 25 nt, Human
aggcuggagugcagugucgcaaucu

SEQ ID NO: 1379638 - RNA, 19 nt, Human
agggauggaguuucaccau

SEQ ID NO: 1379639 - RNA, 24 nt, Human
aggugauccgccugccucagccuc

SEQ ID NO: 1379640 - RNA, 21 nt, Human
aguagaaaugggauuugccau

SEQ ID NO: 1379641 - RNA, 18 nt, Human
agucaaacugagcugagg

SEQ ID NO: 1379642 - RNA, 19 nt, Human
agucucagagaagcacagc

SEQ ID NO: 1379643 - RNA, 20 nt, Human
agugcaauggugugaucgug

SEQ ID NO: 1379644 - RNA, 23 nt, Human
agugcaauggugugaucguggcu

SEQ ID NO: 1379645 - RNA, 24 nt, Human
agugcaauggugugaucguggcuc

SEQ ID NO: 1379646 - RNA, 20 nt, Human
agugcagugucgcaaucuug

SEQ ID NO: 1379647 - RNA, 24 nt, Human
agugcagugucgcaaucuuggcuc

SEQ ID NO: 1379648 - RNA, 18 nt, Human
agugcugggauuacaggc

SEQ ID NO: 1379649 - RNA, 18 nt, Human
agugcugggauuacaggc

SEQ ID NO: 1379650 - RNA, 21 nt, Human
aguggcugggacuacagacau

SEQ ID NO: 1379651 - RNA, 23 nt, Human
aguggcugggacuacagacaugc

SEQ ID NO: 1379652 - RNA, 20 nt, Human
auaaacagugauacguacau

SEQ ID NO: 1379653 - RNA, 24 nt, Human
augaucuacccaccuuggccuccc

SEQ ID NO: 1379654 - RNA, 18 nt, Human
auggaguuucaccauguu

SEQ ID NO: 1379655 - RNA, 22 nt, Human
auggaguuucaccauguuggcc

SEQ ID NO: 1379656 - RNA, 24 nt, Human
auggaguuucaccauguuggccag

SEQ ID NO: 1379657 - RNA, 24 nt, Human
augggauuugccauguuggccagg

SEQ ID NO: 1379658 - RNA, 21 nt, Human
augugcacugagaaaggauaa

SEQ ID NO: 1379659 - RNA, 24 nt, Human
auuuuucuauuuuuaguagggaug

SEQ ID NO: 1379660 - RNA, 23 nt, Human
caaaagacucuacuugaacaagg

SEQ ID NO: 1379661 - RNA, 22 nt, Human
caaaguacugggauuauaggcg

SEQ ID NO: 1379662 - RNA, 24 nt, Human
caaagugcugggauuacaggcaug

SEQ ID NO: 1379663 - RNA, 24 nt, Human
caaagugcugggauuacaggcgug

SEQ ID NO: 1379664 - RNA, 23 nt, Human
caacaaaaaccaaagagcuguaa

SEQ ID NO: 1379665 - RNA, 18 nt, Human
caaccgccuaggcucaag

SEQ ID NO: 1379666 - RNA, 23 nt, Human
caagugauuucuccugccucagc

SEQ ID NO: 1379667 - RNA, 23 nt, Human
cacagcagagccccaguccugcc

SEQ ID NO: 1379668 - RNA, 24 nt, Human
caccacgcccggcuaauuuuugua

SEQ ID NO: 1379669 - RNA, 24 nt, Human
caccaggcuggagugcaauggugu

SEQ ID NO: 1379670 - RNA, 21 nt, Human
caccauguuggccaggcuggu

SEQ ID NO: 1379671 - RNA, 24 nt, Human
caccauguuggccaggcuggucuc

SEQ ID NO: 1379672 - RNA, 27 nt, Human
caccauguuggccaggcuggucucaaa

SEQ ID NO: 1379673 - RNA, 22 nt, Human
caccuaauggaacacaccaaca

SEQ ID NO: 1379674 - RNA, 21 nt, Human
cacugcaaccuccgcccccug

SEQ ID NO: 1379675 - RNA, 22 nt, Human
cacugcaaccuccgccuccggg

SEQ ID NO: 1379676 - RNA, 25 nt, Human
cagaacagucaaaaacagagagagg

SEQ ID NO: 1379677 - RNA, 20 nt, Human
cagaguccugucagugaaag

SEQ ID NO: 1379678 - RNA, 22 nt, Human
cagccccgagguggcagucagg

SEQ ID NO: 1379679 - RNA, 20 nt, Human
cagccuccugaguagcuggg

SEQ ID NO: 1379680 - RNA, 20 nt, Human
cagccuccugaguggcuggg

SEQ ID NO: 1379681 - RNA, 21 nt, Human
cagcuucuuucagucuguauc

SEQ ID NO: 1379682 - RNA, 22 nt, Human
caggugauccgccugccucagc

SEQ ID NO: 1379683 - RNA, 21 nt, Human
caguggccacagucuuggcuc

SEQ ID NO: 1379684 - RNA, 21 nt, Human
cauguugcccaggcuggucuc

SEQ ID NO: 1379685 - RNA, 24 nt, Human
cauguugcccaggcuggucucgaa

SEQ ID NO: 1379686 - RNA, 24 nt, Human
cauguuggccaggcuggucucaaa

SEQ ID NO: 1379687 - RNA, 24 nt, Human
cauguuggccaggcuggucucgaa

SEQ ID NO: 1379688 - RNA, 18 nt, Human
ccaaaguacugggauuau

SEQ ID NO: 1379689 - RNA, 22 nt, Human
ccaaagugcugggauuacaggc

SEQ ID NO: 1379690 - RNA, 22 nt, Human
ccaaagugcugggauuacaggc

SEQ ID NO: 1379691 - RNA, 22 nt, Human
ccaaagugcugggauuacaggc

SEQ ID NO: 1379692 - RNA, 24 nt, Human
ccaaagugcugggauuacaggcau

SEQ ID NO: 1379693 - RNA, 24 nt, Human
ccaaagugcugggauuacaggcgu

SEQ ID NO: 1379694 - RNA, 20 nt, Human
ccaccacgcccggcuaauuu

SEQ ID NO: 1379695 - RNA, 18 nt, Human
ccaguccugccugaccag

SEQ ID NO: 1379696 - RNA, 19 nt, Human
ccauguugcccaggcuggu

SEQ ID NO: 1379697 - RNA, 22 nt, Human
ccauguugcccaggcuggucuc

SEQ ID NO: 1379698 - RNA, 23 nt, Human
ccauguugcccaggcuggucucg

SEQ ID NO: 1379699 - RNA, 19 nt, Human
ccauguuggccaggcuggu

SEQ ID NO: 1379700 - RNA, 23 nt, Human
ccauguuggccaggcuggucucg

SEQ ID NO: 1379701 - RNA, 23 nt, Human
cccaagaagcugggauuauaggc

SEQ ID NO: 1379702 - RNA, 24 nt, Human
cccaagaagcugggauuauaggcg

SEQ ID NO: 1379703 - RNA, 24 nt, Human
cccacuucagccuccugaguggcu

SEQ ID NO: 1379704 - RNA, 18 nt, Human
cccagccgggaaaagagg

SEQ ID NO: 1379705 - RNA, 20 nt, Human
cccaggaggaggucaaggcu

SEQ ID NO: 1379706 - RNA, 21 nt, Human
cccgaucucaggugauccgcc

SEQ ID NO: 1379707 - RNA, 22 nt, Human
cccuggguucaagugauuucuc

SEQ ID NO: 1379708 - RNA, 25 nt, Human
cccuggguucaagugauuucuccug

SEQ ID NO: 1379709 - RNA, 24 nt, Human
ccgcccccuggguucaagugauuu

SEQ ID NO: 1379710 - RNA, 25 nt, Human
ccgccugccucagccucccaaagua

SEQ ID NO: 1379711 - RNA, 23 nt, Human
ccgggguucaagugauuuuccug

SEQ ID NO: 1379712 - RNA, 22 nt, Human
ccuaauggaacacaccaacaaa

SEQ ID NO: 1379713 - RNA, 18 nt, Human
ccucaagagaucugccca

SEQ ID NO: 1379714 - RNA, 24 nt, Human
ccucccacuucagccuccugagug

SEQ ID NO: 1379715 - RNA, 20 nt, Human
ccuccgggguucaagugauu

SEQ ID NO: 1379716 - RNA, 20 nt, Human
ccucugugcucuagccuugg

SEQ ID NO: 1379717 - RNA, 19 nt, Human
ccugaccucaagagaucug

SEQ ID NO: 1379718 - RNA, 24 nt, Human
ccugagcugaaaugaucuacccac

SEQ ID NO: 1379719 - RNA, 21 nt, Human
ccugaguagcugggauuacau

SEQ ID NO: 1379720 - RNA, 19 nt, Human
ccugaguggcugggacuac

SEQ ID NO: 1379721 - RNA, 19 nt, Human
ccugccacagccucccaag

SEQ ID NO: 1379722 - RNA, 23 nt, Human
ccugccucagccuccugaguagc

SEQ ID NO: 1379723 - RNA, 24 nt, Human
ccuggguucaagugauuucucccc

SEQ ID NO: 1379724 - RNA, 24 nt, Human
ccuggguucaagugauuucuccug

SEQ ID NO: 1379725 - RNA, 21 nt, Human
ccuuuagucccagcuacucag

SEQ ID NO: 1379726 - RNA, 22 nt, Human
cgagguggcagucaggcccacc

SEQ ID NO: 1379727 - RNA, 18 nt, Human
cgaucucaggugauccgc

SEQ ID NO: 1379728 - RNA, 24 nt, Human
cgaucucaggugauccgccugccu

SEQ ID NO: 1379729 - RNA, 23 nt, Human
cgcacaccaccaugaccagcuaa

SEQ ID NO: 1379730 - RNA, 22 nt, Human
cgcccccuggguucaagugauu

SEQ ID NO: 1379731 - RNA, 19 nt, Human
cucaagagaucugcccacc

SEQ ID NO: 1379732 - RNA, 24 nt, Human
cucaagcaauccucccacuucagc

SEQ ID NO: 1379733 - RNA, 23 nt, Human
cucacugcaaccuccgccuccgg

SEQ ID NO: 1379734 - RNA, 23 nt, Human
cucagccuccugaguagcuggga

SEQ ID NO: 1379735 - RNA, 21 nt, Human
cucaggugauccgccugccuc

SEQ ID NO: 1379736 - RNA, 23 nt, Human
cucaggugauccgccugccucag

SEQ ID NO: 1379737 - RNA, 24 nt, Human
cucgcucugucgcccaggcuggag

SEQ ID NO: 1379738 - RNA, 20 nt, Human
cucugucgcccaggcuggag

SEQ ID NO: 1379739 - RNA, 24 nt, Human
cugaaaugaucuacccaccuuggc

SEQ ID NO: 1379740 - RNA, 23 nt, Human
cugcaaccuccgcccccuggguu

SEQ ID NO: 1379741 - RNA, 24 nt, Human
cugcaaccuccgcccccuggguuc

SEQ ID NO: 1379742 - RNA, 24 nt, Human
cugcaaccuccgccuccgggguuc

SEQ ID NO: 1379743 - RNA, 20 nt, Human
cugcagcuucuuucagucug

SEQ ID NO: 1379744 - RNA, 23 nt, Human
cugccucagccuccugaguagcu

SEQ ID NO: 1379745 - RNA, 18 nt, Human
cuguaugauuccauucac

SEQ ID NO: 1379746 - RNA, 19 nt, Human
cuuaaguucuuucauuaca

SEQ ID NO: 1379747 - RNA, 24 nt, Human
gaaaugcucaaaaucuagacagaa

SEQ ID NO: 1379748 - RNA, 21 nt, Human
gaacaagcagacacuguccuc

SEQ ID NO: 1379749 - RNA, 18 nt, Human
gaagcugggauuauaggc

SEQ ID NO: 1379750 - RNA, 24 nt, Human
gaccucaagagaucugcccaccuc

SEQ ID NO: 1379751 - RNA, 20 nt, Human
gagaggaaggagaauggugg

SEQ ID NO: 1379752 - RNA, 20 nt, Human
gagaugggguuuugccaugu

SEQ ID NO: 1379753 - RNA, 24 nt, Human
gagcugaaaugaucuacccaccuu

SEQ ID NO: 1379754 - RNA, 21 nt, Human
gaggcagaacagucaaaaaca

SEQ ID NO: 1379755 - RNA, 26 nt, Human
gaguagcugggauuacaugcgcacac

SEQ ID NO: 1379756 - RNA, 21 nt, Human
gauccgccugccucagccucc

SEQ ID NO: 1379757 - RNA, 23 nt, Human
gaucucaggugauccgccugccu

SEQ ID NO: 1379758 - RNA, 18 nt, Human
gauuacaggcaugagcca

SEQ ID NO: 1379759 - RNA, 21 nt, Human
gauuacaggcaugagccauug

SEQ ID NO: 1379760 - RNA, 24 nt, Human
gauuacaggcaugagccauugugc

SEQ ID NO: 1379761 - RNA, 18 nt, Human
gauuacaggcgugagcca

SEQ ID NO: 1379762 - RNA, 18 nt, Human
gauuauaggcgagagcca

SEQ ID NO: 1379763 - RNA, 22 nt, Human
gcaaccuccgccuccgggguuc

SEQ ID NO: 1379764 - RNA, 20 nt, Human
gccauguugcccaggcuggu

SEQ ID NO: 1379765 - RNA, 21 nt, Human
gcccaggcuggagugcagugu

SEQ ID NO: 1379766 - RNA, 22 nt, Human
gcccggcuaauuuuuguauuuu

SEQ ID NO: 1379767 - RNA, 24 nt, Human
gccuaggcucaagcaauccuccca

SEQ ID NO: 1379768 - RNA, 21 nt, Human
gccucugugcucuagccuugg

SEQ ID NO: 1379769 - RNA, 18 nt, Human
gcgcacaccaccaugacc

SEQ ID NO: 1379770 - RNA, 19 nt, Human
gcgcacaccaccaugacca

SEQ ID NO: 1379771 - RNA, 25 nt, Human
gcucugucgcccaggcuggagugca

SEQ ID NO: 1379772 - RNA, 25 nt, Human
gcucuguugcccagacuggagucca

SEQ ID NO: 1379773 - RNA, 23 nt, Human
gcuggucucgaacuccugaccuc

SEQ ID NO: 1379774 - RNA, 23 nt, Human
ggaccugcuggggaaauuuuccu

SEQ ID NO: 1379775 - RNA, 19 nt, Human
ggaggccagcuggguacaa

SEQ ID NO: 1379776 - RNA, 22 nt, Human
ggaguuucaccauguuggccag

SEQ ID NO: 1379777 - RNA, 24 nt, Human
ggauuacaggcaugagccauugug

SEQ ID NO: 1379778 - RNA, 22 nt, Human
ggcuggagugcaauggugugau

SEQ ID NO: 1379779 - RNA, 24 nt, Human
ggcuggucucgaacuccugaccuc

SEQ ID NO: 1379780 - RNA, 21 nt, Human
gggauuugccauguuggccag

SEQ ID NO: 1379781 - RNA, 23 nt, Human
gggguucaagugauuuuccugcc

SEQ ID NO: 1379782 - RNA, 22 nt, Human
gggguuuugccauguugcccag

SEQ ID NO: 1379783 - RNA, 23 nt, Human
gggguuuugccauguugcccagg

SEQ ID NO: 1379784 - RNA, 19 nt, Human
ggguucaagugauuuuccu

SEQ ID NO: 1379785 - RNA, 22 nt, Human
ggguuuugccauguugcccagg

SEQ ID NO: 1379786 - RNA, 19 nt, Human
ggucucgaacuccugaccu

SEQ ID NO: 1379787 - RNA, 23 nt, Human
gguucugucaccaggcuggagug

SEQ ID NO: 1379788 - RNA, 19 nt, Human
guagagaugggguuuugcc

SEQ ID NO: 1379789 - RNA, 21 nt, Human
guagagaugggguuuugccau

SEQ ID NO: 1379790 - RNA, 22 nt, Human
guagagaugggguuuugccaug

SEQ ID NO: 1379791 - RNA, 19 nt, Human
guauuuuuuguagagaugg

SEQ ID NO: 1379792 - RNA, 21 nt, Human
gucaaaaacagagagaggaag

SEQ ID NO: 1379793 - RNA, 24 nt, Human
gucaaaaacagagagaggaaggag

SEQ ID NO: 1379794 - RNA, 18 nt, Human
gugauccgccugccucag

SEQ ID NO: 1379795 - RNA, 24 nt, Human
gugauccgccugccucagccuccc

SEQ ID NO: 1379796 - RNA, 24 nt, Human
gugauuuuccugccacagccuccc

SEQ ID NO: 1379797 - RNA, 24 nt, Human
guuuugccauguugcccaggcugg

SEQ ID NO: 1379798 - RNA, 24 nt, Human
uaaaaacaacaacaaaaaccaaag

SEQ ID NO: 1379799 - RNA, 21 nt, Human
uaaaugacacacaauuuagaa

SEQ ID NO: 1379800 - RNA, 19 nt, Human
uaacuagacagacgacuga

SEQ ID NO: 1379801 - RNA, 21 nt, Human
uaacugauacugagaucaaaa

SEQ ID NO: 1379802 - RNA, 19 nt, Human
uaagaaagagcaacagucg

SEQ ID NO: 1379803 - RNA, 21 nt, Human
uaauuuuucuauuuuuaguag

SEQ ID NO: 1379804 - RNA, 24 nt, Human
uaauuuuucuauuuuuaguaggga

SEQ ID NO: 1379805 - RNA, 22 nt, Human
uaauuuuuguauuuuuaguaga

SEQ ID NO: 1379806 - RNA, 24 nt, Human
uaauuuuuguauuuuuuguagaga

SEQ ID NO: 1379807 - RNA, 23 nt, Human
uacaaugaagcccaacuauagga

SEQ ID NO: 1379808 - RNA, 24 nt, Human
uacagccccgagguggcagucagg

SEQ ID NO: 1379809 - RNA, 22 nt, Human
uacaggcaugagccauugugcc

SEQ ID NO: 1379810 - RNA, 22 nt, Human
uacaggcgugagccaaaaguca

SEQ ID NO: 1379811 - RNA, 22 nt, Human
uacccaccuuggccucccaaag

SEQ ID NO: 1379812 - RNA, 23 nt, Human
uacccaccuuggccucccaaagu

SEQ ID NO: 1379813 - RNA, 21 nt, Human
uagaaaugggauuugccaugu

SEQ ID NO: 1379814 - RNA, 22 nt, Human
uagagaugggguuuugccaugu

SEQ ID NO: 1379815 - RNA, 19 nt, Human
uaggcgccugccaccacgc

SEQ ID NO: 1379816 - RNA, 21 nt, Human
uaggcgccugccaccacgccc

SEQ ID NO: 1379817 - RNA, 23 nt, Human
uaggcgccugccaccacgcccgg

SEQ ID NO: 1379818 - RNA, 23 nt, Human
uaguagaaaugggauuugccaug

SEQ ID NO: 1379819 - RNA, 24 nt, Human
uaguagggauggaguuucaccaug

SEQ ID NO: 1379820 - RNA, 21 nt, Human
uauuuuuaguagggauggagu

SEQ ID NO: 1379821 - RNA, 20 nt, Human
ucaagugauuucuccugccu

SEQ ID NO: 1379822 - RNA, 18 nt, Human
ucacugcaaccuccgccc

SEQ ID NO: 1379823 - RNA, 23 nt, Human
ucacugcaaccuccgcccccugg

SEQ ID NO: 1379824 - RNA, 23 nt, Human
ucacugcaaccuccgcccccugg

SEQ ID NO: 1379825 - RNA, 24 nt, Human
ucacugcaaccuccgcccccuggg

SEQ ID NO: 1379826 - RNA, 27 nt, Human
ucacugcaaccuccgcccccuggguuc

SEQ ID NO: 1379827 - RNA, 20 nt, Human
ucacugcaaccuccgccucc

SEQ ID NO: 1379828 - RNA, 22 nt, Human
ucacugcaaccuccgccuccgg

SEQ ID NO: 1379829 - RNA, 23 nt, Human
ucacugcaaccuccgccuccggg

SEQ ID NO: 1379830 - RNA, 25 nt, Human
ucacugcaaccuccgccuccggggu

SEQ ID NO: 1379831 - RNA, 26 nt, Human
ucacugcaaccuccgccuccgggguu

SEQ ID NO: 1379832 - RNA, 20 nt, Human
ucagccuccugaguagcugg

SEQ ID NO: 1379833 - RNA, 23 nt, Human
ucagccuccugaguggcugggac

SEQ ID NO: 1379834 - RNA, 20 nt, Human
ucaggcccaccuaauggaac

SEQ ID NO: 1379835 - RNA, 22 nt, Human
ucaggugauccgccugccucag

SEQ ID NO: 1379836 - RNA, 23 nt, Human
uccaaagugcugggauuacaggc

SEQ ID NO: 1379837 - RNA, 24 nt, Human
uccaaagugcugggauuacaggca

SEQ ID NO: 1379838 - RNA, 24 nt, Human
ucccaaaguacugggauuauaggc

SEQ ID NO: 1379839 - RNA, 24 nt, Human
ucccaaagugcugggauuacaggc

SEQ ID NO: 1379840 - RNA, 24 nt, Human
ucccaagaagcugggauuauaggc

SEQ ID NO: 1379841 - RNA, 21 nt, Human
uccgggguucaagugauuuuc

SEQ ID NO: 1379842 - RNA, 24 nt, Human
uccgggguucaagugauuuuccug

SEQ ID NO: 1379843 - RNA, 18 nt, Human
uccugaguagcugggauu

SEQ ID NO: 1379844 - RNA, 18 nt, Human
uccugaguggcugggacu

SEQ ID NO: 1379845 - RNA, 22 nt, Human
uccugccacagccucccaagaa

SEQ ID NO: 1379846 - RNA, 24 nt, Human
ucgcccaggcuggagugcaguguc

SEQ ID NO: 1379847 - RNA, 24 nt, Human
ucgcucugucgcccaggcuggagu

SEQ ID NO: 1379848 - RNA, 24 nt, Human
ucuccugccucagccuccugagua

SEQ ID NO: 1379849 - RNA, 21 nt, Human
ucucgaacuccugaccucaag

SEQ ID NO: 1379850 - RNA, 18 nt, Human
ucucgaauuccugagcug

SEQ ID NO: 1379851 - RNA, 19 nt, Human
ucucgcucugucgcccagg

SEQ ID NO: 1379852 - RNA, 23 nt, Human
ucucgcucugucgcccaggcugg

SEQ ID NO: 1379853 - RNA, 24 nt, Human
ucucgcucugucgcccaggcugga

SEQ ID NO: 1379854 - RNA, 26 nt, Human
ucucgcucugucgcccaggcuggagu

SEQ ID NO: 1379855 - RNA, 27 nt, Human
ucucgcucugucgcccaggcuggagug

SEQ ID NO: 1379856 - RNA, 23 nt, Human
ucugucaccaggcuggagugcaa

SEQ ID NO: 1379857 - RNA, 24 nt, Human
ucugucgcccaggcuggagugcag

SEQ ID NO: 1379858 - RNA, 24 nt, Human
ucugugcucuagccuuggcaacag

SEQ ID NO: 1379859 - RNA, 22 nt, Human
ucuuaaguucuuucauuacaga

SEQ ID NO: 1379860 - RNA, 24 nt, Human
ucuugcucuguugcccagacugga

SEQ ID NO: 1379861 - RNA, 25 nt, Human
ugaaaaacguaaaaacaacaacaaa

SEQ ID NO: 1379862 - RNA, 31 nt, Human
ugaaaaacguaaaaacaacaacaaaaaccaa

SEQ ID NO: 1379863 - RNA, 26 nt, Human
ugaaauaaaucaggcacaaaaagaca

SEQ ID NO: 1379864 - RNA, 18 nt, Human
ugaauagauaaacaguga

SEQ ID NO: 1379865 - RNA, 21 nt, Human
ugacccaauccauggcaacaa

SEQ ID NO: 1379866 - RNA, 18 nt, Human
ugaccucaagagaucugc

SEQ ID NO: 1379867 - RNA, 22 nt, Human
ugagacagagucuugcucuguu

SEQ ID NO: 1379868 - RNA, 22 nt, Human
ugagaccugucucugaaaaacg

SEQ ID NO: 1379869 - RNA, 21 nt, Human
ugagaucaaaacagaauaugc

SEQ ID NO: 1379870 - RNA, 21 nt, Human
ugagccaaaagucaaaaauuu

SEQ ID NO: 1379871 - RNA, 21 nt, Human
ugaggcagaacagucaaaaac

SEQ ID NO: 1379872 - RNA, 24 nt, Human
ugaucuacccaccuuggccuccca

SEQ ID NO: 1379873 - RNA, 24 nt, Human
ugauuucuccugccucagccuccu

SEQ ID NO: 1379874 - RNA, 18 nt, Human
ugcaauggugugaucgug

SEQ ID NO: 1379875 - RNA, 18 nt, Human
ugcagaagagaaauggag

SEQ ID NO: 1379876 - RNA, 22 nt, Human
ugcagugucgcaaucuuggcuc

SEQ ID NO: 1379877 - RNA, 23 nt, Human
ugcagugucgcaaucuuggcuca

SEQ ID NO: 1379878 - RNA, 21 nt, Human
ugcaucaccaugccuaccuaa

SEQ ID NO: 1379879 - RNA, 24 nt, Human
ugccacagccucccaagaagcugg

SEQ ID NO: 1379880 - RNA, 24 nt, Human
ugccauguugcccaggcuggucuc

SEQ ID NO: 1379881 - RNA, 24 nt, Human
ugccauguuggccaggcuggucuc

SEQ ID NO: 1379882 - RNA, 27 nt, Human
ugccauguuggccaggcuggucucgaa

SEQ ID NO: 1379883 - RNA, 21 nt, Human
ugcccaccucaaccuuccaaa

SEQ ID NO: 1379884 - RNA, 18 nt, Human
ugcccagacuggagucca

SEQ ID NO: 1379885 - RNA, 20 nt, Human
ugcccagacuggaguccagu

SEQ ID NO: 1379886 - RNA, 21 nt, Human
ugcccagacuggaguccagug

SEQ ID NO: 1379887 - RNA, 23 nt, Human
ugcccagacuggaguccaguggc

SEQ ID NO: 1379888 - RNA, 24 nt, Human
ugcccaggcuggucucgaauuccu

SEQ ID NO: 1379889 - RNA, 28 nt, Human
ugcccaggcuggucucgaauuccugagc

SEQ ID NO: 1379890 - RNA, 24 nt, Human
ugccucagccucccaaaguacugg

SEQ ID NO: 1379891 - RNA, 24 nt, Human
ugccucagccuccugaguagcugg

SEQ ID NO: 1379892 - RNA, 19 nt, Human
ugccuuuagucccagcuac

SEQ ID NO: 1379893 - RNA, 23 nt, Human
ugccuuuagucccagcuacucag

SEQ ID NO: 1379894 - RNA, 22 nt, Human
ugcucaaaaucuagacagaaau

SEQ ID NO: 1379895 - RNA, 19 nt, Human
ugcucuguugcccagacug

SEQ ID NO: 1379896 - RNA, 19 nt, Human
ugcugcuucaaccgccuag

SEQ ID NO: 1379897 - RNA, 24 nt, Human
ugcugggauuacaggcgugagcca

SEQ ID NO: 1379898 - RNA, 26 nt, Human
uggaacacaccaacaaaaggggaguc

SEQ ID NO: 1379899 - RNA, 19 nt, Human
uggagugcaauggugugau

SEQ ID NO: 1379900 - RNA, 21 nt, Human
uggagugcaauggugugaucg

SEQ ID NO: 1379901 - RNA, 24 nt, Human
uggagugcaauggugugaucgugg

SEQ ID NO: 1379902 - RNA, 23 nt, Human
uggagugcagugucgcaaucuug

SEQ ID NO: 1379903 - RNA, 24 nt, Human
uggagugcagugucgcaaucuugg

SEQ ID NO: 1379904 - RNA, 24 nt, Human
uggaguuucaccauguuggccagg

SEQ ID NO: 1379905 - RNA, 21 nt, Human
uggaugaauagauaaacagug

SEQ ID NO: 1379906 - RNA, 21 nt, Human
uggccaggcuggucucaaacu

SEQ ID NO: 1379907 - RNA, 24 nt, Human
uggccaggcuggucucgaacuccu

SEQ ID NO: 1379908 - RNA, 24 nt, Human
ugggacuacagacaugcaucacca

SEQ ID NO: 1379909 - RNA, 18 nt, Human
ugggauuacaggcaugag

SEQ ID NO: 1379910 - RNA, 19 nt, Human
ugggauuacaggcaugagc

SEQ ID NO: 1379911 - RNA, 21 nt, Human
ugggauuacaggcaugagcca

SEQ ID NO: 1379912 - RNA, 21 nt, Human
ugggauuacaggcaugagcca

SEQ ID NO: 1379913 - RNA, 21 nt, Human
ugggauuacaggcaugagcca

SEQ ID NO: 1379914 - RNA, 22 nt, Human
ugggauuacaggcaugagccau

SEQ ID NO: 1379915 - RNA, 23 nt, Human
ugggauuacaggcaugagccauu

SEQ ID NO: 1379916 - RNA, 24 nt, Human
ugggauuacaggcaugagccauug

SEQ ID NO: 1379917 - RNA, 27 nt, Human
ugggauuacaggcaugagccauugugc

SEQ ID NO: 1379918 - RNA, 18 nt, Human
ugggauuacaggcgugag

SEQ ID NO: 1379919 - RNA, 19 nt, Human
ugggauuacaggcgugagc

SEQ ID NO: 1379920 - RNA, 21 nt, Human
ugggauuacaggcgugagcca

SEQ ID NO: 1379921 - RNA, 25 nt, Human
ugggauuacaggcgugagccaaaag

SEQ ID NO: 1379922 - RNA, 26 nt, Human
ugggauuacaggcgugagccaaaagu

SEQ ID NO: 1379923 - RNA, 22 nt, Human
ugggauuacaugcgcacaccac

SEQ ID NO: 1379924 - RNA, 24 nt, Human
ugggauuacaugcgcacaccacca

SEQ ID NO: 1379925 - RNA, 18 nt, Human
ugggauuauaggcgagag

SEQ ID NO: 1379926 - RNA, 19 nt, Human
ugggauuauaggcgagagc

SEQ ID NO: 1379927 - RNA, 21 nt, Human
ugggauuauaggcgagagcca

SEQ ID NO: 1379928 - RNA, 22 nt, Human
ugggauuauaggcgagagccac

SEQ ID NO: 1379929 - RNA, 23 nt, Human
ugggauuauaggcgagagccacc

SEQ ID NO: 1379930 - RNA, 24 nt, Human
ugggauuauaggcgagagccacca

SEQ ID NO: 1379931 - RNA, 21 nt, Human
ugggauuauaggcgccugcca

SEQ ID NO: 1379932 - RNA, 22 nt, Human
ugggauuauaggcgccugccac

SEQ ID NO: 1379933 - RNA, 24 nt, Human
ugggauuauaggcgccugccacca

SEQ ID NO: 1379934 - RNA, 23 nt, Human
ugggauuugccauguuggccagg

SEQ ID NO: 1379935 - RNA, 24 nt, Human
ugggguuuugccauguugcccagg

SEQ ID NO: 1379936 - RNA, 18 nt, Human
uggguucaagugauuucu

SEQ ID NO: 1379937 - RNA, 24 nt, Human
uggguucaagugauuucuccugcc

SEQ ID NO: 1379938 - RNA, 24 nt, Human
uguagagaugggguuuugccaugu

SEQ ID NO: 1379939 - RNA, 23 nt, Human
ugugaucaaguguucaucaaugg

SEQ ID NO: 1379940 - RNA, 23 nt, Human
uuaaacaucuuuuaucuuuuuuu

SEQ ID NO: 1379941 - RNA, 21 nt, Human
uuagccuuaaaaaggauagaa

SEQ ID NO: 1379942 - RNA, 18 nt, Human
uuaguagaaaugggauuu

SEQ ID NO: 1379943 - RNA, 23 nt, Human
uuaguagaaaugggauuugccau

SEQ ID NO: 1379944 - RNA, 18 nt, Human
uuaguagggauggaguuu

SEQ ID NO: 1379945 - RNA, 24 nt, Human
uuaguagggauggaguuucaccau

SEQ ID NO: 1379946 - RNA, 22 nt, Human
uucaagugauuucuccugccuc

SEQ ID NO: 1379947 - RNA, 24 nt, Human
uucaagugauuucuccugccucag

SEQ ID NO: 1379948 - RNA, 19 nt, Human
uucaagugauuuuccugcc

SEQ ID NO: 1379949 - RNA, 24 nt, Human
uucagccuccugaguggcugggac

SEQ ID NO: 1379950 - RNA, 24 nt, Human
uugccauguuggccaggcuggucu

SEQ ID NO: 1379951 - RNA, 18 nt, Human
uuggccucccaaagugcu

SEQ ID NO: 1379952 - RNA, 24 nt, Human
uuguagagaugggguuuugccaug

SEQ ID NO: 1379953 - RNA, 24 nt, Human
uuucaccauguuggccaggcuggu

SEQ ID NO: 1379954 - RNA, 24 nt, Human
uuuguagagaugggguuuugccau

SEQ ID NO: 1379955 - RNA, 22 nt, Human
uuuugccauguugcccaggcug

SEQ ID NO: 1379956 - RNA, 23 nt, Human
uuuugccauguugcccaggcugg

SEQ ID NO: 1379957 - RNA, 21 nt, Human
uuuuuaguagaaaugggauuu

SEQ ID NO: 1379958 - RNA, 24 nt, Human
uuuuuaguagggauggaguuucac

SEQ ID NO: 1379959 - RNA, 18 nt, Human
uuuuuguauuuuuaguag

SEQ ID NO: 1379960 - RNA, 20 nt, Human
uuuuuguauuuuuuguagag

SEQ ID NO: 1379961 - RNA, 23 nt, Human
uuuuuguauuuuuuguagagaug

SEQ ID NO: 1379962 - RNA, 24 nt, Human
uuuuuuguagagaugggguuuugc

SEQ ID NO: 1379963 - RNA, 20 nt, Human
uuuuuuuuuuugagacagag

SEQ ID NO: 1379964 - RNA, 23 nt, Human
aaacuucugaccucaggcaaucc

SEQ ID NO: 1379965 - RNA, 24 nt, Human
aaagugcugggauuacaggcauga

SEQ ID NO: 1379966 - RNA, 21 nt, Human
aaaucucccuuaucucuaccu

SEQ ID NO: 1379967 - RNA, 18 nt, Human
aaaucuccuucagaggcc

SEQ ID NO: 1379968 - RNA, 19 nt, Human
aacauggcaaaacccaucu

SEQ ID NO: 1379969 - RNA, 21 nt, Human
aaccaaagaguaguaagacag

SEQ ID NO: 1379970 - RNA, 20 nt, Human
aaccuccuucaggaagcuaa

SEQ ID NO: 1379971 - RNA, 23 nt, Human
aagauuaaaaguuacacaaaucu

SEQ ID NO: 1379972 - RNA, 26 nt, Human
aagcacuaggauuacaguugugagcc

SEQ ID NO: 1379973 - RNA, 22 nt, Human
aaguagcugagauuacaggcau

SEQ ID NO: 1379974 - RNA, 25 nt, Human
aaguagcugagauuacaggcauucg

SEQ ID NO: 1379975 - RNA, 19 nt, Human
aagugcugggauuacaggc

SEQ ID NO: 1379976 - RNA, 21 nt, Human
aagugcugggauuacaggcau

SEQ ID NO: 1379977 - RNA, 26 nt, Human
aagugcugggauuacaggcaugagcc

SEQ ID NO: 1379978 - RNA, 24 nt, Human
acagagcaagaccuugucucaaaa

SEQ ID NO: 1379979 - RNA, 24 nt, Human
acagagggagacuccaucucaaaa

SEQ ID NO: 1379980 - RNA, 21 nt, Human
acaggcauucgccaccaugcc

SEQ ID NO: 1379981 - RNA, 18 nt, Human
accaacaagaggucuugc

SEQ ID NO: 1379982 - RNA, 18 nt, Human
accacgccuggcuaauuu

SEQ ID NO: 1379983 - RNA, 18 nt, Human
accauguuggccaggcug

SEQ ID NO: 1379984 - RNA, 24 nt, Human
accggaggucaggaguucaagacc

SEQ ID NO: 1379985 - RNA, 21 nt, Human
accuguaguaacagcacuuug

SEQ ID NO: 1379986 - RNA, 28 nt, Human
accuugucucaaaaaaaaaaaaaaaaaa

SEQ ID NO: 1379987 - RNA, 25 nt, Human
acucugucucccaggcuggaaagca

SEQ ID NO: 1379988 - RNA, 26 nt, Human
acugcacucuagaaccugggcaacag

SEQ ID NO: 1379989 - RNA, 19 nt, Human
acugcagccuugaccuccu

SEQ ID NO: 1379990 - RNA, 18 nt, Human
acuuguuuuccaggcugg

SEQ ID NO: 1379991 - RNA, 21 nt, Human
acuuguuuuccaggcuggagu

SEQ ID NO: 1379992 - RNA, 24 nt, Human
acuuugggaggcagaggugggcag

SEQ ID NO: 1379993 - RNA, 24 nt, Human
agagauucuccugucucagccucc

SEQ ID NO: 1379994 - RNA, 24 nt, Human
agcacuuugggaggcagagguggg

SEQ ID NO: 1379995 - RNA, 24 nt, Human
agcacuuugggaggccgagguggg

SEQ ID NO: 1379996 - RNA, 19 nt, Human
agccaggugugguggugau

SEQ ID NO: 1379997 - RNA, 19 nt, Human
aggaggaugagagagcccu

SEQ ID NO: 1379998 - RNA, 24 nt, Human
aggcaauccgcccguguuggccuc

SEQ ID NO: 1379999 - RNA, 24 nt, Human
aggcacgguggcucacaccuauaa

SEQ ID NO: 1380000 - RNA, 21 nt, Human
aggcagaggugggcagaucac

SEQ ID NO: 1380001 - RNA, 21 nt, Human
aggccgaggugggagaaucac

SEQ ID NO: 1380002 - RNA, 24 nt, Human
aggccgaggugggagaaucacuug

SEQ ID NO: 1380003 - RNA, 20 nt, Human
aggcggagguugcagugagc

SEQ ID NO: 1380004 - RNA, 24 nt, Human
aggcggagguugcagugagcugag

SEQ ID NO: 1380005 - RNA, 18 nt, Human
aggugggagaaucacuug

SEQ ID NO: 1380006 - RNA, 23 nt, Human
aggugggagaaucacuuggaccc

SEQ ID NO: 1380007 - RNA, 22 nt, Human
aggugggcagaucaccggaggu

SEQ ID NO: 1380008 - RNA, 24 nt, Human
aggugugguggugaucgccuguaa

SEQ ID NO: 1380009 - RNA, 21 nt, Human
agugcaauggcgcgauuucag

SEQ ID NO: 1380010 - RNA, 18 nt, Human
agugcugggauuacaggc

SEQ ID NO: 1380011 - RNA, 22 nt, Human
auaaaucuccuucagaggccag

SEQ ID NO: 1380012 - RNA, 25 nt, Human
auaauaauaacuuccuaaguaugcc

SEQ ID NO: 1380013 - RNA, 25 nt, Human
aucaugcaccacugcacucuagaac

SEQ ID NO: 1380014 - RNA, 18 nt, Human
auccucccgccucagccu

SEQ ID NO: 1380015 - RNA, 22 nt, Human
augggguuucaccauguuggcc

SEQ ID NO: 1380016 - RNA, 24 nt, Human
caaagcacuaggauuacaguugug

SEQ ID NO: 1380017 - RNA, 24 nt, Human
caaagugcugggauuacaggcaug

SEQ ID NO: 1380018 - RNA, 20 nt, Human
caacaaacuuauuuuugauu

SEQ ID NO: 1380019 - RNA, 22 nt, Human
caagagauucuccugucucagc

SEQ ID NO: 1380020 - RNA, 26 nt, Human
cacaccuauaaucccccagcacuuug

SEQ ID NO: 1380021 - RNA, 26 nt, Human
caccacugcacucuagaaccugggca

SEQ ID NO: 1380022 - RNA, 24 nt, Human
caccaugcccagcuaauuuuugua

SEQ ID NO: 1380023 - RNA, 21 nt, Human
caccauguuggccaggcuggu

SEQ ID NO: 1380024 - RNA, 24 nt, Human
caccauguuggccaggcuggucuc

SEQ ID NO: 1380025 - RNA, 23 nt, Human
caccggaggucaggaguucaaga

SEQ ID NO: 1380026 - RNA, 25 nt, Human
caccuauaaucccccagcacuuugg

SEQ ID NO: 1380027 - RNA, 24 nt, Human
cacucugucucccaggcuggaaag

SEQ ID NO: 1380028 - RNA, 21 nt, Human
cacugcaaccucugccucccg

SEQ ID NO: 1380029 - RNA, 23 nt, Human
cacugcaaccucugccucccggg

SEQ ID NO: 1380030 - RNA, 21 nt, Human
cacugcacucuagaaccuggg

SEQ ID NO: 1380031 - RNA, 24 nt, Human
cacugcacucuagaaccugggcaa

SEQ ID NO: 1380032 - RNA, 25 nt, Human
cacugcacucuagaaccugggcaac

SEQ ID NO: 1380033 - RNA, 26 nt, Human
cacugcacucuagaaccugggcaaca

SEQ ID NO: 1380034 - RNA, 19 nt, Human
cacugcagccuugaccucc

SEQ ID NO: 1380035 - RNA, 18 nt, Human
cacuuguuuuccaggcug

SEQ ID NO: 1380036 - RNA, 27 nt, Human
cagaggugggcagaucaccggagguca

SEQ ID NO: 1380037 - RNA, 24 nt, Human
cagaucaccggaggucaggaguuc

SEQ ID NO: 1380038 - RNA, 24 nt, Human
cagcacuuugggaggcagaggugg

SEQ ID NO: 1380039 - RNA, 24 nt, Human
cagcacuuugggaggccgaggugg

SEQ ID NO: 1380040 - RNA, 22 nt, Human
cagcagaauugcuucagcccag

SEQ ID NO: 1380041 - RNA, 21 nt, Human
cagccuugaccuccuaggcuc

SEQ ID NO: 1380042 - RNA, 23 nt, Human
cagccuugaccuccuaggcucaa

SEQ ID NO: 1380043 - RNA, 24 nt, Human
cagccuugaccuccuaggcucaaa

SEQ ID NO: 1380044 - RNA, 24 nt, Human
cauguuggccaggcuggucucaaa

SEQ ID NO: 1380045 - RNA, 23 nt, Human
ccaaagugcugggauuacaggca

SEQ ID NO: 1380046 - RNA, 24 nt, Human
ccaaagugcugggauuacaggcau

SEQ ID NO: 1380047 - RNA, 23 nt, Human
ccaaguagcugagauuacaggca

SEQ ID NO: 1380048 - RNA, 24 nt, Human
ccaaguagcugagauuacaggcau

SEQ ID NO: 1380049 - RNA, 22 nt, Human
ccacugcacucuagaaccuggg

SEQ ID NO: 1380050 - RNA, 22 nt, Human
ccacugcacucuagaaccuggg

SEQ ID NO: 1380051 - RNA, 26 nt, Human
ccacugcacucuagaaccugggcaac

SEQ ID NO: 1380052 - RNA, 22 nt, Human
ccagaccaacaagaggucuugc

SEQ ID NO: 1380053 - RNA, 22 nt, Human
ccaggaggcggagguugcagug

SEQ ID NO: 1380054 - RNA, 18 nt, Human
ccaggcuggagugcaaug

SEQ ID NO: 1380055 - RNA, 24 nt, Human
cccaaagugcugggauuacaggca

SEQ ID NO: 1380056 - RNA, 19 nt, Human
cccaaguagcugagauuac

SEQ ID NO: 1380057 - RNA, 24 nt, Human
cccaaguagcugagauuacaggca

SEQ ID NO: 1380058 - RNA, 21 nt, Human
cccccacccagucccagggac

SEQ ID NO: 1380059 - RNA, 22 nt, Human
cccccacccagucccagggacu

SEQ ID NO: 1380060 - RNA, 20 nt, Human
cccccagcacuuugggaggc

SEQ ID NO: 1380061 - RNA, 23 nt, Human
cccggguucaagagauucuccug

SEQ ID NO: 1380062 - RNA, 22 nt, Human
cccguguuggccucccaaagug

SEQ ID NO: 1380063 - RNA, 23 nt, Human
ccgccucagccuucugaguagcu

SEQ ID NO: 1380064 - RNA, 22 nt, Human
ccuaggcucaaacaauccuccc

SEQ ID NO: 1380065 - RNA, 20 nt, Human
ccucccaaagcacuaggauu

SEQ ID NO: 1380066 - RNA, 24 nt, Human
ccucccgccucagccuucugagua

SEQ ID NO: 1380067 - RNA, 24 nt, Human
ccucccggguucaagagauucucc

SEQ ID NO: 1380068 - RNA, 22 nt, Human
ccuccugccucgaccucccaaa

SEQ ID NO: 1380069 - RNA, 24 nt, Human
ccuccugccucgaccucccaaagc

SEQ ID NO: 1380070 - RNA, 21 nt, Human
ccuggucucaagggagccucc

SEQ ID NO: 1380071 - RNA, 22 nt, Human
ccuguaaccccagcuccuuggg

SEQ ID NO: 1380072 - RNA, 19 nt, Human
ccuugaccuccuaggcuca

SEQ ID NO: 1380073 - RNA, 24 nt, Human
ccuugucucaaaaaaaaaaaaaaa

SEQ ID NO: 1380074 - RNA, 22 nt, Human
cgaggugggagaaucacuugga

SEQ ID NO: 1380075 - RNA, 20 nt, Human
cgccgccccccacccagucc

SEQ ID NO: 1380076 - RNA, 20 nt, Human
cgccucagccuucugaguag

SEQ ID NO: 1380077 - RNA, 23 nt, Human
cgccucagccuucugaguagcuu

SEQ ID NO: 1380078 - RNA, 21 nt, Human
cgccuguaaccccagcuccuu

SEQ ID NO: 1380079 - RNA, 23 nt, Human
cgccuguaaccccagcuccuugg

SEQ ID NO: 1380080 - RNA, 21 nt, Human
cuauacugaaaaaugucagaa

SEQ ID NO: 1380081 - RNA, 18 nt, Human
cucaaaaaaaaaaaaaaa

SEQ ID NO: 1380082 - RNA, 23 nt, Human
cucaaaaaaaaaaaaaaaaaaaa

SEQ ID NO: 1380083 - RNA, 26 nt, Human
cucaaaaaaaaaaaaaaaaaaaaaaa

SEQ ID NO: 1380084 - RNA, 24 nt, Human
cucaaacaauccucccgccucagc

SEQ ID NO: 1380085 - RNA, 24 nt, Human
cucacaccuauaaucccccagcac

SEQ ID NO: 1380086 - RNA, 24 nt, Human
cucacugcaaccucugccucccgg

SEQ ID NO: 1380087 - RNA, 21 nt, Human
cucacugcagccuugaccucc

SEQ ID NO: 1380088 - RNA, 23 nt, Human
cucauuagagauuugaagccaga

SEQ ID NO: 1380089 - RNA, 21 nt, Human
cucccaaguagcugagauuac

SEQ ID NO: 1380090 - RNA, 21 nt, Human
cuccuugggaggcugagacag

SEQ ID NO: 1380091 - RNA, 21 nt, Human
cucugucucccaggcuggaaa

SEQ ID NO: 1380092 - RNA, 20 nt, Human
cugaaaaaugucagaaugua

SEQ ID NO: 1380093 - RNA, 21 nt, Human
cugaccucaggcaauccgccc

SEQ ID NO: 1380094 - RNA, 19 nt, Human
cugcaaccucugccucccg

SEQ ID NO: 1380095 - RNA, 23 nt, Human
cugcaaccucugccucccggguu

SEQ ID NO: 1380096 - RNA, 24 nt, Human
cugcaaccucugccucccggguuc

SEQ ID NO: 1380097 - RNA, 22 nt, Human
cugcagccuugaccuccuaggc

SEQ ID NO: 1380098 - RNA, 23 nt, Human
cugcagccuugaccuccuaggcu

SEQ ID NO: 1380099 - RNA, 21 nt, Human
cuggucucaaacuccuggucu

SEQ ID NO: 1380100 - RNA, 23 nt, Human
cugucucagccucccaaguagcu

SEQ ID NO: 1380101 - RNA, 23 nt, Human
cuucugaccucaggcaauccgcc

SEQ ID NO: 1380102 - RNA, 26 nt, Human
cuucugaccucaggcaauccgcccgu

SEQ ID NO: 1380103 - RNA, 22 nt, Human
cuuugcaguuccgccgcccccc

SEQ ID NO: 1380104 - RNA, 24 nt, Human
cuuuuaguagaaaugggguuucac

SEQ ID NO: 1380105 - RNA, 18 nt, Human
gaacacuaaucggauugg

SEQ ID NO: 1380106 - RNA, 20 nt, Human
gagacagggucucacucugu

SEQ ID NO: 1380107 - RNA, 21 nt, Human
gagccuccugccucgaccucc

SEQ ID NO: 1380108 - RNA, 21 nt, Human
gaggcggagguugcagugagc

SEQ ID NO: 1380109 - RNA, 23 nt, Human
gagguugcagugagcugagaucg

SEQ ID NO: 1380110 - RNA, 21 nt, Human
gaucaaugaagauuaaaaguu

SEQ ID NO: 1380111 - RNA, 23 nt, Human
gaucaccggaggucaggaguuca

SEQ ID NO: 1380112 - RNA, 24 nt, Human
gaucaccggaggucaggaguucaa

SEQ ID NO: 1380113 - RNA, 20 nt, Human
gauuaagccaaaucucccuu

SEQ ID NO: 1380114 - RNA, 18 nt, Human
gauuacaggcaugagcca

SEQ ID NO: 1380115 - RNA, 22 nt, Human
gauuacaggcaugagccacugc

SEQ ID NO: 1380116 - RNA, 23 nt, Human
gauuacaggcaugagccacugca

SEQ ID NO: 1380117 - RNA, 22 nt, Human
gauuacaggcauucgccaccau

SEQ ID NO: 1380118 - RNA, 18 nt, Human
gauuacaguugugagcca

SEQ ID NO: 1380119 - RNA, 21 nt, Human
gauuacaguugugagccacca

SEQ ID NO: 1380120 - RNA, 22 nt, Human
gcaguuccgccgccccccaccc

SEQ ID NO: 1380121 - RNA, 23 nt, Human
gccacugcacccggccaacaaac

SEQ ID NO: 1380122 - RNA, 18 nt, Human
gccucgaccucccaaagc

SEQ ID NO: 1380123 - RNA, 23 nt, Human
gccucgaccucccaaagcacuag

SEQ ID NO: 1380124 - RNA, 21 nt, Human
gcucacugcagccuugaccuc

SEQ ID NO: 1380125 - RNA, 19 nt, Human
gcuggagugcaauggcgcg

SEQ ID NO: 1380126 - RNA, 22 nt, Human
ggagguugcagugagcugagau

SEQ ID NO: 1380127 - RNA, 24 nt, Human
ggagguugcagugagcugagaucg

SEQ ID NO: 1380128 - RNA, 22 nt, Human
ggauuacaggcaugagccacug

SEQ ID NO: 1380129 - RNA, 22 nt, Human
ggauuacaguugugagccacca

SEQ ID NO: 1380130 - RNA, 24 nt, Human
ggcuggucucaaacuccuggucuc

SEQ ID NO: 1380131 - RNA, 24 nt, Human
ggcuggucucaaacuucugaccuc

SEQ ID NO: 1380132 - RNA, 26 nt, Human
gggcagaucaccggaggucaggaguu

SEQ ID NO: 1380133 - RNA, 24 nt, Human
gggggucuuguuacguugcccagg

SEQ ID NO: 1380134 - RNA, 22 nt, Human
gggguuucaccauguuggccag

SEQ ID NO: 1380135 - RNA, 22 nt, Human
gggucuuguuacguugcccagg

SEQ ID NO: 1380136 - RNA, 18 nt, Human
ggguuucaccauguuggc

SEQ ID NO: 1380137 - RNA, 19 nt, Human
ggucucaaacuucugaccu

SEQ ID NO: 1380138 - RNA, 22 nt, Human
guugcagugagcugagaucguc

SEQ ID NO: 1380139 - RNA, 20 nt, Human
uaaaaauacaaaauuuagcc

SEQ ID NO: 1380140 - RNA, 21 nt, Human
uaaaaauacaaaauuuagcca

SEQ ID NO: 1380141 - RNA, 19 nt, Human
uaauaccauacguuaauau

SEQ ID NO: 1380142 - RNA, 22 nt, Human
uaauuuuuguacuuuuaguaga

SEQ ID NO: 1380143 - RNA, 22 nt, Human
uacaggcacgugcuaccacgcc

SEQ ID NO: 1380144 - RNA, 23 nt, Human
uacaggcaugagccacugcaccc

SEQ ID NO: 1380145 - RNA, 24 nt, Human
uacaggcauucgccaccaugccca

SEQ ID NO: 1380146 - RNA, 24 nt, Human
uacaguugugagccaccacaucca

SEQ ID NO: 1380147 - RNA, 24 nt, Human
uaccacgccuggcuaauuuuuaau

SEQ ID NO: 1380148 - RNA, 23 nt, Human
uacguugcccaggcuggucucaa

SEQ ID NO: 1380149 - RNA, 24 nt, Human
uacguugcccaggcuggucucaaa

SEQ ID NO: 1380150 - RNA, 22 nt, Human
uacucuauucacuugguauuua

SEQ ID NO: 1380151 - RNA, 22 nt, Human
uagaaaugggguuucaccaugu

SEQ ID NO: 1380152 - RNA, 20 nt, Human
uagccaaauauuuuuaguua

SEQ ID NO: 1380153 - RNA, 22 nt, Human
uaggauuacaguugugagccac

SEQ ID NO: 1380154 - RNA, 24 nt, Human
uaggauuacaguugugagccacca

SEQ ID NO: 1380155 - RNA, 26 nt, Human
uaguaagacagugaaauuuaggagga

SEQ ID NO: 1380156 - RNA, 24 nt, Human
uaguagaaaugggguuucaccaug

SEQ ID NO: 1380157 - RNA, 26 nt, Human
uaguagaaaugggguuucaccauguu

SEQ ID NO: 1380158 - RNA, 23 nt, Human
ucaaaaaaaaaaaaaaaaaaaaa

SEQ ID NO: 1380159 - RNA, 23 nt, Human
ucacacuuguuuuccaggcugga

SEQ ID NO: 1380160 - RNA, 23 nt, Human
ucaccggaggucaggaguucaag

SEQ ID NO: 1380161 - RNA, 24 nt, Human
ucacugcaaccucugccucccggg

SEQ ID NO: 1380162 - RNA, 25 nt, Human
ucacugcaaccucugccucccgggu

SEQ ID NO: 1380163 - RNA, 19 nt, Human
ucacugcagccuugaccuc

SEQ ID NO: 1380164 - RNA, 23 nt, Human
ucacugcagccuugaccuccuag

SEQ ID NO: 1380165 - RNA, 24 nt, Human
ucacugcagccuugaccuccuagg

SEQ ID NO: 1380166 - RNA, 21 nt, Human
ucagccucccaaguagcugag

SEQ ID NO: 1380167 - RNA, 23 nt, Human
ucagccuucugaguagcuugggc

SEQ ID NO: 1380168 - RNA, 18 nt, Human
ucaggaagcuaagccaug

SEQ ID NO: 1380169 - RNA, 18 nt, Human
uccagcuuggugacagag

SEQ ID NO: 1380170 - RNA, 19 nt, Human
uccagcuuggugacagagg

SEQ ID NO: 1380171 - RNA, 24 nt, Human
ucccaaagugcugggauuacaggc

SEQ ID NO: 1380172 - RNA, 24 nt, Human
ucccaaguagcugagauuacaggc

SEQ ID NO: 1380173 - RNA, 21 nt, Human
ucccggguucaagagauucuc

SEQ ID NO: 1380174 - RNA, 24 nt, Human
ucccggguucaagagauucuccug

SEQ ID NO: 1380175 - RNA, 19 nt, Human
uccuucaggaagcuaagcc

SEQ ID NO: 1380176 - RNA, 19 nt, Human
ucucaaaaaaaaaaaaaaa

SEQ ID NO: 1380177 - RNA, 23 nt, Human
ucucacucugucucccaggcugg

SEQ ID NO: 1380178 - RNA, 24 nt, Human
ucucacucugucucccaggcugga

SEQ ID NO: 1380179 - RNA, 26 nt, Human
ucuccugucucagccucccaaguagc

SEQ ID NO: 1380180 - RNA, 22 nt, Human
ucucuacuaaaaauacaaaauu

SEQ ID NO: 1380181 - RNA, 24 nt, Human
ucugaguagcuugggcuacaggca

SEQ ID NO: 1380182 - RNA, 20 nt, Human
ucuuacacacucuaaaagac

SEQ ID NO: 1380183 - RNA, 23 nt, Human
ucuuguuacguugcccaggcugg

SEQ ID NO: 1380184 - RNA, 24 nt, Human
ucuuguuacguugcccaggcuggu

SEQ ID NO: 1380185 - RNA, 21 nt, Human
ugaccucaggcaauccgcccg

SEQ ID NO: 1380186 - RNA, 24 nt, Human
ugaccuccuaggcucaaacaaucc

SEQ ID NO: 1380187 - RNA, 25 nt, Human
ugaccuccuaggcucaaacaauccu

SEQ ID NO: 1380188 - RNA, 20 nt, Human
ugagacagggucucacucug

SEQ ID NO: 1380189 - RNA, 22 nt, Human
ugagacagggucucacucuguc

SEQ ID NO: 1380190 - RNA, 19 nt, Human
ugagauuacaggcauucgc

SEQ ID NO: 1380191 - RNA, 21 nt, Human
ugagauuacaggcauucgcca

SEQ ID NO: 1380192 - RNA, 22 nt, Human
ugagauuacaggcauucgccac

SEQ ID NO: 1380193 - RNA, 24 nt, Human
ugagauuacaggcauucgccacca

SEQ ID NO: 1380194 - RNA, 24 nt, Human
ugcaaugagccgugaucaugcacc

SEQ ID NO: 1380195 - RNA, 24 nt, Human
ugcccaggcuggucucaaacuccu

SEQ ID NO: 1380196 - RNA, 23 nt, Human
ugccucgaccucccaaagcacua

SEQ ID NO: 1380197 - RNA, 24 nt, Human
ugccucgaccucccaaagcacuag

SEQ ID NO: 1380198 - RNA, 24 nt, Human
uggaaagcaauggcacaauauugg

SEQ ID NO: 1380199 - RNA, 23 nt, Human
uggagugcaauggcgcgauuuca

SEQ ID NO: 1380200 - RNA, 24 nt, Human
uggagugcaauggcgcgauuucag

SEQ ID NO: 1380201 - RNA, 23 nt, Human
uggcacaauauuggcucacugca

SEQ ID NO: 1380202 - RNA, 24 nt, Human
uggccaggcuggucucaaacuucu

SEQ ID NO: 1380203 - RNA, 24 nt, Human
uggcgcgauuucagcucacugcaa

SEQ ID NO: 1380204 - RNA, 20 nt, Human
uggcucacaccuauaauccc

SEQ ID NO: 1380205 - RNA, 24 nt, Human
uggcucacugcagccuugaccucc

SEQ ID NO: 1380206 - RNA, 18 nt, Human
ugggaggcagaggugggc

SEQ ID NO: 1380207 - RNA, 19 nt, Human
ugggaggcagaggugggca

SEQ ID NO: 1380208 - RNA, 20 nt, Human
ugggaggcagaggugggcag

SEQ ID NO: 1380209 - RNA, 24 nt, Human
ugggaggcagaggugggcagauca

SEQ ID NO: 1380210 - RNA, 19 nt, Human
ugggaggccgaggugggag

SEQ ID NO: 1380211 - RNA, 24 nt, Human
ugggaggccgaggugggagaauca

SEQ ID NO: 1380212 - RNA, 18 nt, Human
ugggaggcugagacagca

SEQ ID NO: 1380213 - RNA, 20 nt, Human
ugggaggcugagacagcaga

SEQ ID NO: 1380214 - RNA, 18 nt, Human
ugggauuacaggcaugag

SEQ ID NO: 1380215 - RNA, 19 nt, Human
ugggauuacaggcaugagc

SEQ ID NO: 1380216 - RNA, 21 nt, Human
ugggauuacaggcaugagcca

SEQ ID NO: 1380217 - RNA, 22 nt, Human
ugggauuacaggcaugagccac

SEQ ID NO: 1380218 - RNA, 22 nt, Human
ugggauuacaggcaugagccac

SEQ ID NO: 1380219 - RNA, 24 nt, Human
ugggauuacaggcaugagccacug

SEQ ID NO: 1380220 - RNA, 24 nt, Human
ugggauuacaggcaugagccacug

SEQ ID NO: 1380221 - RNA, 26 nt, Human
ugggauuacaggcaugagccacugca

SEQ ID NO: 1380222 - RNA, 24 nt, Human
ugggcagaucaccggaggucagga

SEQ ID NO: 1380223 - RNA, 23 nt, Human
ugggcuacaggcacgugcuacca

SEQ ID NO: 1380224 - RNA, 24 nt, Human
ugggguuucaccauguuggccagg

SEQ ID NO: 1380225 - RNA, 24 nt, Human
ugucucagccucccaaguagcuga

SEQ ID NO: 1380226 - RNA, 21 nt, Human
uguguacaacuaugaagauca

SEQ ID NO: 1380227 - RNA, 24 nt, Human
uguuacguugcccaggcuggucuc

SEQ ID NO: 1380228 - RNA, 27 nt, Human
uguuacguugcccaggcuggucucaaa

SEQ ID NO: 1380229 - RNA, 26 nt, Human
uguucuacuuauauaaaucuccuuca

SEQ ID NO: 1380230 - RNA, 18 nt, Human
uguucuuguucuugguca

SEQ ID NO: 1380231 - RNA, 18 nt, Human
uuaguagaaaugggguuu

SEQ ID NO: 1380232 - RNA, 22 nt, Human
uuaguagaaaugggguuucacc

SEQ ID NO: 1380233 - RNA, 24 nt, Human
uuaguagaaaugggguuucaccau

SEQ ID NO: 1380234 - RNA, 24 nt, Human
uucacacuuguuuuccaggcugga

SEQ ID NO: 1380235 - RNA, 24 nt, Human
uucagcccaggaggcggagguugc

SEQ ID NO: 1380236 - RNA, 23 nt, Human
uuccaggcuggagugcaauggcg

SEQ ID NO: 1380237 - RNA, 24 nt, Human
uucugaguagcuugggcuacaggc

SEQ ID NO: 1380238 - RNA, 21 nt, Human
uucuuguucuuggucauuuca

SEQ ID NO: 1380239 - RNA, 21 nt, Human
uugaaaaauacuuugcaguuc

SEQ ID NO: 1380240 - RNA, 20 nt, Human
uugcagugagcugagaucgu

SEQ ID NO: 1380241 - RNA, 22 nt, Human
uugcagugagcugagaucgucc

SEQ ID NO: 1380242 - RNA, 21 nt, Human
uugcucuuucccucaauugcc

SEQ ID NO: 1380243 - RNA, 24 nt, Human
uugcuucagcccaggaggcggagg

SEQ ID NO: 1380244 - RNA, 19 nt, Human
uugggaggcagaggugggc

SEQ ID NO: 1380245 - RNA, 25 nt, Human
uugggaggccgaggugggagaauca

SEQ ID NO: 1380246 - RNA, 23 nt, Human
uugggaggcugagacagcagaau

SEQ ID NO: 1380247 - RNA, 20 nt, Human
uugugagccaccacauccag

SEQ ID NO: 1380248 - RNA, 23 nt, Human
uuguuuuccaggcuggagugcaa

SEQ ID NO: 1380249 - RNA, 21 nt, Human
uuuacauugguauuuuggcca

SEQ ID NO: 1380250 - RNA, 18 nt, Human
uuuagccagguguggugg

SEQ ID NO: 1380251 - RNA, 23 nt, Human
uuucacacuuguuuuccaggcug

SEQ ID NO: 1380252 - RNA, 24 nt, Human
uuucaccauguuggccaggcuggu

SEQ ID NO: 1380253 - RNA, 24 nt, Human
uuuggccaggcacgguggcucaca

SEQ ID NO: 1380254 - RNA, 25 nt, Human
uuuguuguuguugagacagggucuc

SEQ ID NO: 1380255 - RNA, 22 nt, Human
uuuuuucuacacuauauuugag

SEQ ID NO: 1380256 - RNA, 21 nt, Human
aaaaauaauugggggacuggu

SEQ ID NO: 1380257 - RNA, 20 nt, Human
aaagaugcaucccuucccag

SEQ ID NO: 1380258 - RNA, 24 nt, Human
aaagugcugggauuacaggcguga

SEQ ID NO: 1380259 - RNA, 21 nt, Human
aacaaagcaagaccucaucuc

SEQ ID NO: 1380260 - RNA, 24 nt, Human
aagugauccgcccccguuggccuc

SEQ ID NO: 1380261 - RNA, 19 nt, Human
aagugcugggauuacaggc

SEQ ID NO: 1380262 - RNA, 19 nt, Human
aagugcugggauuacaggc

SEQ ID NO: 1380263 - RNA, 26 nt, Human
aagugcugggauuacaggcgugagcc

SEQ ID NO: 1380264 - RNA, 18 nt, Human
aagugggaggaucgcuug

SEQ ID NO: 1380265 - RNA, 21 nt, Human
aauugggggacuggugcggug

SEQ ID NO: 1380266 - RNA, 18 nt, Human
acaaagcaagaccucauc

SEQ ID NO: 1380267 - RNA, 18 nt, Human
acaggguuucaccauguu

SEQ ID NO: 1380268 - RNA, 23 nt, Human
acaggguuucaccauguuggcca

SEQ ID NO: 1380269 - RNA, 24 nt, Human
acaggguuucaccauguuggccag

SEQ ID NO: 1380270 - RNA, 24 nt, Human
accauguuggccaggcuggucucg

SEQ ID NO: 1380271 - RNA, 24 nt, Human
agcacuuuggaaggccaaaguggg

SEQ ID NO: 1380272 - RNA, 18 nt, Human
agccacugugcccagccc

SEQ ID NO: 1380273 - RNA, 22 nt, Human
agcuguugccccggguaacggu

SEQ ID NO: 1380274 - RNA, 24 nt, Human
aggccaaagugggaggaucgcuug

SEQ ID NO: 1380275 - RNA, 25 nt, Human
aggcuggggugcaguggcacgaucu

SEQ ID NO: 1380276 - RNA, 18 nt, Human
aguagcugggauuacagg

SEQ ID NO: 1380277 - RNA, 19 nt, Human
aguagcugggauuacaggc

SEQ ID NO: 1380278 - RNA, 20 nt, Human
aguagcugggauuacaggcc

SEQ ID NO: 1380279 - RNA, 18 nt, Human
agugcugggauuacaggc

SEQ ID NO: 1380280 - RNA, 30 nt, Human
aucuggaaucccagcacuuuggaaggccaa

SEQ ID NO: 1380281 - RNA, 23 nt, Human
augcaaauccugguauaaaggau

SEQ ID NO: 1380282 - RNA, 21 nt, Human
augccuuuccuucauacaucc

SEQ ID NO: 1380283 - RNA, 21 nt, Human
auuacaggcgcaugccaccau

SEQ ID NO: 1380284 - RNA, 24 nt, Human
caaagugcugggauuacaggcgug

SEQ ID NO: 1380285 - RNA, 19 nt, Human
caacaaagcaagaccucau

SEQ ID NO: 1380286 - RNA, 24 nt, Human
caccaugcccggcuaauuuuugua

SEQ ID NO: 1380287 - RNA, 21 nt, Human
caccauguuggccaggcuggu

SEQ ID NO: 1380288 - RNA, 24 nt, Human
caccauguuggccaggcuggucuc

SEQ ID NO: 1380289 - RNA, 24 nt, Human
cagcacuuuggaaggccaaagugg

SEQ ID NO: 1380290 - RNA, 24 nt, Human
caggguuucaccauguuggccagg

SEQ ID NO: 1380291 - RNA, 24 nt, Human
caguagagacaggguuucaccaug

SEQ ID NO: 1380292 - RNA, 26 nt, Human
caguagagacaggguuucaccauguu

SEQ ID NO: 1380293 - RNA, 22 nt, Human
cauacagaagaaaagaugcauc

SEQ ID NO: 1380294 - RNA, 23 nt, Human
cauacagaagaaaagaugcaucc

SEQ ID NO: 1380295 - RNA, 22 nt, Human
caucuggaaucccagcacuuug

SEQ ID NO: 1380296 - RNA, 24 nt, Human
cauguuggccaggcuggucucgaa

SEQ ID NO: 1380297 - RNA, 22 nt, Human
ccaaagugcugggauuacaggc

SEQ ID NO: 1380298 - RNA, 22 nt, Human
ccaaagugcugggauuacaggc

SEQ ID NO: 1380299 - RNA, 24 nt, Human
ccaaagugcugggauuacaggcgu

SEQ ID NO: 1380300 - RNA, 27 nt, Human
ccagccuagacaacaaagcaagaccuc

SEQ ID NO: 1380301 - RNA, 24 nt, Human
cccgaguagcugggauuacaggcg

SEQ ID NO: 1380302 - RNA, 18 nt, Human
cccuucccagacggcuca

SEQ ID NO: 1380303 - RNA, 22 nt, Human
ccgaguagcugggauuacaggc

SEQ ID NO: 1380304 - RNA, 21 nt, Human
ccguuggccucccaaagugcu

SEQ ID NO: 1380305 - RNA, 24 nt, Human
ccugccugagacucccgaguagcu

SEQ ID NO: 1380306 - RNA, 23 nt, Human
ccuggauucaagcaauucuccug

SEQ ID NO: 1380307 - RNA, 23 nt, Human
cgaguagcugggauuacaggcgc

SEQ ID NO: 1380308 - RNA, 19 nt, Human
cucaagugauccgcccccg

SEQ ID NO: 1380309 - RNA, 21 nt, Human
cucacugcaaccuccgccacc

SEQ ID NO: 1380310 - RNA, 24 nt, Human
cucgcaucuggaaucccagcacuu

SEQ ID NO: 1380311 - RNA, 24 nt, Human
cugcaaccuccgccaccuggauuc

SEQ ID NO: 1380312 - RNA, 20 nt, Human
cuugaguuaccaguguuucc

SEQ ID NO: 1380313 - RNA, 18 nt, Human
gaccucaagugauccgcc

SEQ ID NO: 1380314 - RNA, 21 nt, Human
gaccucaagugauccgccccc

SEQ ID NO: 1380315 - RNA, 26 nt, Human
gaguagcugggauuacaggcgcaugc

SEQ ID NO: 1380316 - RNA, 23 nt, Human
gaucgcuugagcccaguucaaga

SEQ ID NO: 1380317 - RNA, 18 nt, Human
gauuacaggcgcaugcca

SEQ ID NO: 1380318 - RNA, 24 nt, Human
gauuacaggcgcaugccaccaugc

SEQ ID NO: 1380319 - RNA, 18 nt, Human
gauuacaggcgugagcca

SEQ ID NO: 1380320 - RNA, 21 nt, Human
gauuacaggcgugagccacug

SEQ ID NO: 1380321 - RNA, 24 nt, Human
gauuacaggcgugagccacugugc

SEQ ID NO: 1380322 - RNA, 22 nt, Human
gcccggcuaauuuuuguauuuu

SEQ ID NO: 1380323 - RNA, 24 nt, Human
gcgguggcucgcaucuggaauccc

SEQ ID NO: 1380324 - RNA, 25 nt, Human
gcucuguugcccaggcuggggugca

SEQ ID NO: 1380325 - RNA, 24 nt, Human
ggcuggucucgaacuucugaccuc

SEQ ID NO: 1380326 - RNA, 22 nt, Human
ggguuucaccauguuggccagg

SEQ ID NO: 1380327 - RNA, 19 nt, Human
ggucucgaacuucugaccu

SEQ ID NO: 1380328 - RNA, 23 nt, Human
ggugcaguggcacgaucucggcu

SEQ ID NO: 1380329 - RNA, 24 nt, Human
ggugcaguggcacgaucucggcuc

SEQ ID NO: 1380330 - RNA, 24 nt, Human
gucuugcucuguugcccaggcugg

SEQ ID NO: 1380331 - RNA, 19 nt, Human
gugcaguggcacgaucucg

SEQ ID NO: 1380332 - RNA, 24 nt, Human
uaauuuuuguauuuucaguagaga

SEQ ID NO: 1380333 - RNA, 23 nt, Human
uacaggcgugagccacugugccc

SEQ ID NO: 1380334 - RNA, 24 nt, Human
uacaggcgugagccacugugccca

SEQ ID NO: 1380335 - RNA, 21 nt, Human
uagagacaggguuucaccaug

SEQ ID NO: 1380336 - RNA, 22 nt, Human
uagagacaggguuucaccaugu

SEQ ID NO: 1380337 - RNA, 22 nt, Human
uagaguucuugacucaagcaua

SEQ ID NO: 1380338 - RNA, 21 nt, Human
uauauacauggcugaaauuua

SEQ ID NO: 1380339 - RNA, 19 nt, Human
ucaagcaauucuccugccu

SEQ ID NO: 1380340 - RNA, 19 nt, Human
ucacugcaaccuccgccac

SEQ ID NO: 1380341 - RNA, 23 nt, Human
ucacugcaaccuccgccaccugg

SEQ ID NO: 1380342 - RNA, 24 nt, Human
ucacugcaaccuccgccaccugga

SEQ ID NO: 1380343 - RNA, 27 nt, Human
ucacugcaaccuccgccaccuggauuc

SEQ ID NO: 1380344 - RNA, 24 nt, Human
ucaguagagacaggguuucaccau

SEQ ID NO: 1380345 - RNA, 24 nt, Human
ucccaaagugcugggauuacaggc

SEQ ID NO: 1380346 - RNA, 24 nt, Human
ucccgaguagcugggauuacaggc

SEQ ID NO: 1380347 - RNA, 23 nt, Human
uccgcccccguuggccucccaaa

SEQ ID NO: 1380348 - RNA, 21 nt, Human
ucucgaacuucugaccucaag

SEQ ID NO: 1380349 - RNA, 24 nt, Human
ucuguugcccaggcuggggugcag

SEQ ID NO: 1380350 - RNA, 21 nt, Human
ucuuccuuuuuuuugagaugg

SEQ ID NO: 1380351 - RNA, 22 nt, Human
ucuugcucuguugcccaggcug

SEQ ID NO: 1380352 - RNA, 23 nt, Human
ucuugcucuguugcccaggcugg

SEQ ID NO: 1380353 - RNA, 23 nt, Human
ucuugcucuguugcccaggcugg

SEQ ID NO: 1380354 - RNA, 24 nt, Human
ucuugcucuguugcccaggcuggg

SEQ ID NO: 1380355 - RNA, 27 nt, Human
ucuugcucuguugcccaggcuggggug

SEQ ID NO: 1380356 - RNA, 20 nt, Human
ugaaaguucuggucuuuuug

SEQ ID NO: 1380357 - RNA, 18 nt, Human
ugaccucaagugauccgc

SEQ ID NO: 1380358 - RNA, 22 nt, Human
ugaccucaagugauccgccccc

SEQ ID NO: 1380359 - RNA, 21 nt, Human
ugacuugcagaagcacuacuu

SEQ ID NO: 1380360 - RNA, 22 nt, Human
ugagacucccgaguagcuggga

SEQ ID NO: 1380361 - RNA, 24 nt, Human
ugagacucccgaguagcugggauu

SEQ ID NO: 1380362 - RNA, 22 nt, Human
ugagauggagucuugcucuguu

SEQ ID NO: 1380363 - RNA, 20 nt, Human
ugagcccaguucaagaccag

SEQ ID NO: 1380364 - RNA, 18 nt, Human
ugcccaggcuggggugca

SEQ ID NO: 1380365 - RNA, 21 nt, Human
ugcccaggcuggggugcagug

SEQ ID NO: 1380366 - RNA, 22 nt, Human
ugcccaggcuggggugcagugg

SEQ ID NO: 1380367 - RNA, 24 nt, Human
ugcccggcuaauuuuuguauuuuc

SEQ ID NO: 1380368 - RNA, 21 nt, Human
ugccugagacucccgaguagc

SEQ ID NO: 1380369 - RNA, 25 nt, Human
ugcgguggcucgcaucuggaauccc

SEQ ID NO: 1380370 - RNA, 24 nt, Human
ugcucuguugcccaggcuggggug

SEQ ID NO: 1380371 - RNA, 24 nt, Human
ugcugggauuacaggcgugagcca

SEQ ID NO: 1380372 - RNA, 21 nt, Human
uggaaggccaaagugggagga

SEQ ID NO: 1380373 - RNA, 24 nt, Human
uggagucuugcucuguugcccagg

SEQ ID NO: 1380374 - RNA, 21 nt, Human
uggauucaagcaauucuccug

SEQ ID NO: 1380375 - RNA, 24 nt, Human
uggauucaagcaauucuccugccu

SEQ ID NO: 1380376 - RNA, 24 nt, Human
uggccaggcuggucucgaacuucu

SEQ ID NO: 1380377 - RNA, 22 nt, Human
uggcucgcaucuggaaucccag

SEQ ID NO: 1380378 - RNA, 24 nt, Human
uggcucgcaucuggaaucccagca

SEQ ID NO: 1380379 - RNA, 22 nt, Human
ugggaaaauuuuuuucaaucuu

SEQ ID NO: 1380380 - RNA, 21 nt, Human
ugggauuacaggcgcaugcca

SEQ ID NO: 1380381 - RNA, 22 nt, Human
ugggauuacaggcgcaugccac

SEQ ID NO: 1380382 - RNA, 24 nt, Human
ugggauuacaggcgcaugccacca

SEQ ID NO: 1380383 - RNA, 25 nt, Human
ugggauuacaggcgcaugccaccau

SEQ ID NO: 1380384 - RNA, 18 nt, Human
ugggauuacaggcgugag

SEQ ID NO: 1380385 - RNA, 21 nt, Human
ugggauuacaggcgugagcca

SEQ ID NO: 1380386 - RNA, 22 nt, Human
ugggauuacaggcgugagccac

SEQ ID NO: 1380387 - RNA, 22 nt, Human
ugggauuacaggcgugagccac

SEQ ID NO: 1380388 - RNA, 22 nt, Human
ugggauuacaggcgugagccac

SEQ ID NO: 1380389 - RNA, 24 nt, Human
ugggauuacaggcgugagccacug

SEQ ID NO: 1380390 - RNA, 26 nt, Human
ugggauuacaggcgugagccacugug

SEQ ID NO: 1380391 - RNA, 23 nt, Human
uggggugcaguggcacgaucucg

SEQ ID NO: 1380392 - RNA, 24 nt, Human
uggggugcaguggcacgaucucgg

SEQ ID NO: 1380393 - RNA, 18 nt, Human
uguagauguaaacacuga

SEQ ID NO: 1380394 - RNA, 24 nt, Human
uuaauggacuuucugauaagauuc

SEQ ID NO: 1380395 - RNA, 22 nt, Human
uuagaaaaauaauugggggacu

SEQ ID NO: 1380396 - RNA, 25 nt, Human
uucaagcaauucuccugccugagac

SEQ ID NO: 1380397 - RNA, 28 nt, Human
uucuuccuuuuuuuugagauggagucuu

SEQ ID NO: 1380398 - RNA, 22 nt, Human
uugaaggauaugcaaauccugg

SEQ ID NO: 1380399 - RNA, 19 nt, Human
uugacucaagcauacagaa

SEQ ID NO: 1380400 - RNA, 21 nt, Human
uugagauggagucuugcucug

SEQ ID NO: 1380401 - RNA, 24 nt, Human
uugcccaggcuggggugcaguggc

SEQ ID NO: 1380402 - RNA, 24 nt, Human
uugcucuguugcccaggcuggggu

SEQ ID NO: 1380403 - RNA, 18 nt, Human
uugcugcagcuuuaagca

SEQ ID NO: 1380404 - RNA, 18 nt, Human
uugggggacuggugcggu

SEQ ID NO: 1380405 - RNA, 20 nt, Human
uugggggacuggugcggugg

SEQ ID NO: 1380406 - RNA, 24 nt, Human
uuucaccauguuggccaggcuggu

SEQ ID NO: 1380407 - RNA, 24 nt, Human
uuuucaguagagacaggguuucac

SEQ ID NO: 1380408 - RNA, 20 nt, Human
uuuuuguauuuucaguagag

SEQ ID NO: 1380409 - RNA, 23 nt, Human
uuuuuguauuuucaguagagaca

SEQ ID NO: 1380410 - RNA, 19 nt, Human
aaacauccuggguaugugg

SEQ ID NO: 1380411 - RNA, 19 nt, Human
aagccucugaggagcccag

SEQ ID NO: 1380412 - RNA, 23 nt, Human
agcccuggcaauggcaggcagcc

SEQ ID NO: 1380413 - RNA, 23 nt, Human
agcuaugaccaggugaaaaccua

SEQ ID NO: 1380414 - RNA, 26 nt, Human
aggagccaggggcugcuccccaaacu

SEQ ID NO: 1380415 - RNA, 19 nt, Human
aggcuggagugcaguggca

SEQ ID NO: 1380416 - RNA, 26 nt, Human
agugacccagcuucaaccaugaggau

SEQ ID NO: 1380417 - RNA, 18 nt, Human
agugcaguggcaugauca

SEQ ID NO: 1380418 - RNA, 19 nt, Human
agugcaguggcaugaucac

SEQ ID NO: 1380419 - RNA, 21 nt, Human
agugcaguggcaugaucacag

SEQ ID NO: 1380420 - RNA, 20 nt, Human
aguggacagacccacucucc

SEQ ID NO: 1380421 - RNA, 24 nt, Human
auccaggcuggagugcaguggcau

SEQ ID NO: 1380422 - RNA, 18 nt, Human
aucccugaacaugccucc

SEQ ID NO: 1380423 - RNA, 18 nt, Human
aucuccuuccuucccaca

SEQ ID NO: 1380424 - RNA, 23 nt, Human
caaaagaucacacuuccccagca

SEQ ID NO: 1380425 - RNA, 20 nt, Human
caagaaaggcccugccugac

SEQ ID NO: 1380426 - RNA, 19 nt, Human
cagcagaaaaccacucagg

SEQ ID NO: 1380427 - RNA, 22 nt, Human
caggcagccugcugggaggcac

SEQ ID NO: 1380428 - RNA, 18 nt, Human
cagugugcccccaacaaa

SEQ ID NO: 1380429 - RNA, 20 nt, Human
caugggccaggcugaggugc

SEQ ID NO: 1380430 - RNA, 22 nt, Human
cccaccuccuccaagaagcaca

SEQ ID NO: 1380431 - RNA, 22 nt, Human
cccacucucccagugugccccc

SEQ ID NO: 1380432 - RNA, 24 nt, Human
cccacucucccagugugcccccaa

SEQ ID NO: 1380433 - RNA, 21 nt, Human
cccucuguaauguggcucuac

SEQ ID NO: 1380434 - RNA, 24 nt, Human
cccuuccgcacaucuccuuccuuc

SEQ ID NO: 1380435 - RNA, 24 nt, Human
ccgcacaucuccuuccuucccaca

SEQ ID NO: 1380436 - RNA, 18 nt, Human
ccucccauggguccagcu

SEQ ID NO: 1380437 - RNA, 20 nt, Human
ccucugaggagcccaggccu

SEQ ID NO: 1380438 - RNA, 21 nt, Human
ccugcacauucacugaguggc

SEQ ID NO: 1380439 - RNA, 24 nt, Human
ccuguaguuaggcauagccggggc

SEQ ID NO: 1380440 - RNA, 23 nt, Human
ccuguggugagcugcucugaggc

SEQ ID NO: 1380441 - RNA, 21 nt, Human
cgaguucacucuccugcuccu

SEQ ID NO: 1380442 - RNA, 23 nt, Human
cuccagaagccucugaggagccc

SEQ ID NO: 1380443 - RNA, 25 nt, Human
cuccuuuucacucaucuaaauuucc

SEQ ID NO: 1380444 - RNA, 24 nt, Human
cuggccaaaucagcacggacuuca

SEQ ID NO: 1380445 - RNA, 20 nt, Human
cuggcucuccaugcucuuuc

SEQ ID NO: 1380446 - RNA, 24 nt, Human
cuguggugagcugcucugaggcug

SEQ ID NO: 1380447 - RNA, 18 nt, Human
cuucccacaaacauccug

SEQ ID NO: 1380448 - RNA, 21 nt, Human
cuucgccuuuccuccuuuuca

SEQ ID NO: 1380449 - RNA, 19 nt, Human
gaaggguagcuugcaagga

SEQ ID NO: 1380450 - RNA, 21 nt, Human
gagccaggggcugcuccccaa

SEQ ID NO: 1380451 - RNA, 20 nt, Human
gcccccaacaaaagaucacc

SEQ ID NO: 1380452 - RNA, 22 nt, Human
gcucuccaugcucuuuccucag

SEQ ID NO: 1380453 - RNA, 19 nt, Human
gcuggagugcaguggcaug

SEQ ID NO: 1380454 - RNA, 24 nt, Human
gcugucauccaggcuggagugcag

SEQ ID NO: 1380455 - RNA, 20 nt, Human
ggagucucgcugucauccag

SEQ ID NO: 1380456 - RNA, 25 nt, Human
ggcaauggcaggcagccugcuggga

SEQ ID NO: 1380457 - RNA, 21 nt, Human
gggggucuguugcagcccuug

SEQ ID NO: 1380458 - RNA, 23 nt, Human
gucucgcugucauccaggcugga

SEQ ID NO: 1380459 - RNA, 22 nt, Human
ucacugaguggcuugcugaccc

SEQ ID NO: 1380460 - RNA, 21 nt, Human
ucagcagaaaaccacucaggc

SEQ ID NO: 1380461 - RNA, 24 nt, Human
ucauccaggcuggagugcaguggc

SEQ ID NO: 1380462 - RNA, 20 nt, Human
uccagaagccucugaggagc

SEQ ID NO: 1380463 - RNA, 21 nt, Human
uccagagggggucuguugcag

SEQ ID NO: 1380464 - RNA, 19 nt, Human
uccccagcacucccuguug

SEQ ID NO: 1380465 - RNA, 18 nt, Human
ucccuguaguuaggcaua

SEQ ID NO: 1380466 - RNA, 22 nt, Human
uccuaaggauacugggucucug

SEQ ID NO: 1380467 - RNA, 19 nt, Human
uccuguaaacuuccagagg

SEQ ID NO: 1380468 - RNA, 18 nt, Human
ucuccugggucccuuccg

SEQ ID NO: 1380469 - RNA, 21 nt, Human
ucucgcugucauccaggcugg

SEQ ID NO: 1380470 - RNA, 21 nt, Human
ucucgcugucauccaggcugg

SEQ ID NO: 1380471 - RNA, 22 nt, Human
ucucgcugucauccaggcugga

SEQ ID NO: 1380472 - RNA, 24 nt, Human
ucucgcugucauccaggcuggagu

SEQ ID NO: 1380473 - RNA, 19 nt, Human
ucucuggacagcacagacu

SEQ ID NO: 1380474 - RNA, 20 nt, Human
ugaagcugaugaguggaaug

SEQ ID NO: 1380475 - RNA, 23 nt, Human
ugcacauucacugaguggcuuuu

SEQ ID NO: 1380476 - RNA, 21 nt, Human
uggacagacccacucucccag

SEQ ID NO: 1380477 - RNA, 19 nt, Human
uggagugcaguggcaugau

SEQ ID NO: 1380478 - RNA, 19 nt, Human
uggagugcaguggcaugau

SEQ ID NO: 1380479 - RNA, 21 nt, Human
uggagugcaguggcaugauca

SEQ ID NO: 1380480 - RNA, 18 nt, Human
uggcaccccucaccagaa

SEQ ID NO: 1380481 - RNA, 24 nt, Human
uggcaccccucaccagaaauuccu

SEQ ID NO: 1380482 - RNA, 21 nt, Human
uggcgcacccugcugaaggcc

SEQ ID NO: 1380483 - RNA, 21 nt, Human
uggcgcacccugcugaaggcc

SEQ ID NO: 1380484 - RNA, 24 nt, Human
uggcucuccaugcucuuuccucag

SEQ ID NO: 1380485 - RNA, 22 nt, Human
uuccucagaaucugucuuugcc

SEQ ID NO: 1380486 - RNA, 24 nt, Human
uuggcaccccucaccagaaauucc

SEQ ID NO: 1380487 - RNA, 20 nt, Human
aaaauuaccuaguaauuucu

SEQ ID NO: 1380488 - RNA, 22 nt, Human
aagagcuccccacuuaaugccu

SEQ ID NO: 1380489 - RNA, 22 nt, Human
acgccuccugccccucccuauc

SEQ ID NO: 1380490 - RNA, 21 nt, Human
agagcuccccacuuaaugccu

SEQ ID NO: 1380491 - RNA, 18 nt, Human
auagaaaacagguuuugc

SEQ ID NO: 1380492 - RNA, 27 nt, Human
cccauagcuguagcauagccggggucc

SEQ ID NO: 1380493 - RNA, 19 nt, Human
cccggggcggcggucaugu

SEQ ID NO: 1380494 - RNA, 21 nt, Human
ccgcugggcggaccuucgugc

SEQ ID NO: 1380495 - RNA, 23 nt, Human
ccggggcggcggucauguugcgc

SEQ ID NO: 1380496 - RNA, 21 nt, Human
ccucacccugcugccgcuggg

SEQ ID NO: 1380497 - RNA, 22 nt, Human
ccucacccugcugccgcugggc

SEQ ID NO: 1380498 - RNA, 22 nt, Human
ccugccccucccuaucaggcca

SEQ ID NO: 1380499 - RNA, 20 nt, Human
ccuucugccuaccacccauu

SEQ ID NO: 1380500 - RNA, 25 nt, Human
ccuucugccuaccacccauuuggcc

SEQ ID NO: 1380501 - RNA, 24 nt, Human
cucuggugugcugcgccuggcucc

SEQ ID NO: 1380502 - RNA, 18 nt, Human
cugccuaccacccauuug

SEQ ID NO: 1380503 - RNA, 22 nt, Human
cugcugccucugugcaggcuga

SEQ ID NO: 1380504 - RNA, 24 nt, Human
cuucgugcacgccuccugccccuc

SEQ ID NO: 1380505 - RNA, 20 nt, Human
gcggagccagagagucuagc

SEQ ID NO: 1380506 - RNA, 19 nt, Human
gcgggucccggggcggcgg

SEQ ID NO: 1380507 - RNA, 28 nt, Human
gcuccuugucacugcugccucugugcag

SEQ ID NO: 1380508 - RNA, 22 nt, Human
ggcaggcuaagagcuccccucu

SEQ ID NO: 1380509 - RNA, 19 nt, Human
uaccacccauuuggccacg

SEQ ID NO: 1380510 - RNA, 23 nt, Human
uagaaaacagguuuugcagcuua

SEQ ID NO: 1380511 - RNA, 22 nt, Human
uagccggcgggucccggggcgg

SEQ ID NO: 1380512 - RNA, 21 nt, Human
uauacccaauugcccugucaa

SEQ ID NO: 1380513 - RNA, 24 nt, Human
uauacccaauugcccugucaaucu

SEQ ID NO: 1380514 - RNA, 20 nt, Human
uccagggcuguguuacccuu

SEQ ID NO: 1380515 - RNA, 21 nt, Human
ucccauagcuguagcauagcu

SEQ ID NO: 1380516 - RNA, 21 nt, Human
uccuugucacugcugccucug

SEQ ID NO: 1380517 - RNA, 20 nt, Human
ucgugcacgccuccugcccc

SEQ ID NO: 1380518 - RNA, 25 nt, Human
ucugugccaccuuuugucugugcug

SEQ ID NO: 1380519 - RNA, 23 nt, Human
ugccaugggccacccgcggagcc

SEQ ID NO: 1380520 - RNA, 20 nt, Human
ugcccaagguggggugaagc

SEQ ID NO: 1380521 - RNA, 23 nt, Human
ugcugccaaguauuuccuucugc

SEQ ID NO: 1380522 - RNA, 24 nt, Human
ugcugccaaguauuuccuucugcc

SEQ ID NO: 1380523 - RNA, 21 nt, Human
uggaagcacuugcuggcucca

SEQ ID NO: 1380524 - RNA, 18 nt, Human
ugggagaauccagggcug

SEQ ID NO: 1380525 - RNA, 23 nt, Human
ugggccacccgcggagccagaga

SEQ ID NO: 1380526 - RNA, 22 nt, Human
ugucugugccaccuuuugucug

SEQ ID NO: 1380527 - RNA, 21 nt, Human
uguuaaaagaaauggguuuau

SEQ ID NO: 1380528 - RNA, 31 nt, Human
uuaagauagaaaacagguuuugcagcuuauu

SEQ ID NO: 1380529 - RNA, 22 nt, Human
uuguauacaaggaacacaugaa

SEQ ID NO: 1380530 - RNA, 24 nt, Human
uuuggccacgcgguuucagccucu

SEQ ID NO: 1380531 - RNA, 24 nt, Human
aaagugcugggauaacaggcguga

SEQ ID NO: 1380532 - RNA, 23 nt, Human
aacccagaugccccaacucuccu

SEQ ID NO: 1380533 - RNA, 19 nt, Human
acaggccccggugugugau

SEQ ID NO: 1380534 - RNA, 21 nt, Human
acaggcgugagccacugcgcc

SEQ ID NO: 1380535 - RNA, 24 nt, Human
accuugugaucugccugccucggc

SEQ ID NO: 1380536 - RNA, 24 nt, Human
acggaguuuccccauguuggccag

SEQ ID NO: 1380537 - RNA, 21 nt, Human
acuacaccuauuaaagacguu

SEQ ID NO: 1380538 - RNA, 20 nt, Human
agaagcacuuccagaagaau

SEQ ID NO: 1380539 - RNA, 22 nt, Human
agccaugcaagccucaggcccu

SEQ ID NO: 1380540 - RNA, 24 nt, Human
agcgauucuccugccucagccucc

SEQ ID NO: 1380541 - RNA, 18 nt, Human
aguagcugggauuacagg

SEQ ID NO: 1380542 - RNA, 18 nt, Human
agugcaguggcgugaucu

SEQ ID NO: 1380543 - RNA, 20 nt, Human
agugcaguggcgugaucuug

SEQ ID NO: 1380544 - RNA, 24 nt, Human
agugcaguggcgugaucuugacuc

SEQ ID NO: 1380545 - RNA, 24 nt, Human
auuuuuguauuuuuaguagagacg

SEQ ID NO: 1380546 - RNA, 22 nt, Human
caaaccagcagccagaggcuga

SEQ ID NO: 1380547 - RNA, 24 nt, Human
caaagugcugggauaacaggcgug

SEQ ID NO: 1380548 - RNA, 19 nt, Human
caagccucaggcccucugu

SEQ ID NO: 1380549 - RNA, 22 nt, Human
caagcgauucuccugccucagc

SEQ ID NO: 1380550 - RNA, 21 nt, Human
cacgcucggcuaauuuuugua

SEQ ID NO: 1380551 - RNA, 30 nt, Human; identical to SEQ ID NO: 1297409

SEQ ID NO: 1380552 - RNA, 22 nt, Human
cacugcuaacccagaugcccca

SEQ ID NO: 1380553 - RNA, 19 nt, Human
caguggcgugaucuugacu

SEQ ID NO: 1380554 - RNA, 20 nt, Human
ccaaagugcugggauaacag

SEQ ID NO: 1380555 - RNA, 22 nt, Human
ccaaagugcugggauaacaggc

SEQ ID NO: 1380556 - RNA, 24 nt, Human
ccaaagugcugggauaacaggcgu

SEQ ID NO: 1380557 - RNA, 20 nt, Human
ccaacucuccucacucauau

SEQ ID NO: 1380558 - RNA, 21 nt, Human
ccaauaaguacugaacaccua

SEQ ID NO: 1380559 - RNA, 21 nt, Human
ccacugcgccuggccuacuua

SEQ ID NO: 1380560 - RNA, 22 nt, Human
ccauguuggccaggauggucuc

SEQ ID NO: 1380561 - RNA, 20 nt, Human
cccagguucaagcgauucuc

SEQ ID NO: 1380562 - RNA, 24 nt, Human
ccccauguuggccaggauggucuc

SEQ ID NO: 1380563 - RNA, 19 nt, Human
ccccgcccccacaacaggc

SEQ ID NO: 1380564 - RNA, 26 nt, Human
ccccgcccccacaacaggccccggug

SEQ ID NO: 1380565 - RNA, 23 nt, Human
cccgaguagcugggauuacaggu

SEQ ID NO: 1380566 - RNA, 24 nt, Human
cccgaguagcugggauuacaggug

SEQ ID NO: 1380567 - RNA, 18 nt, Human
cccgcccccacaacaggc

SEQ ID NO: 1380568 - RNA, 20 nt, Human
cccucuguuucuaccucugc

SEQ ID NO: 1380569 - RNA, 21 nt, Human
ccgaguagcugggauuacagg

SEQ ID NO: 1380570 - RNA, 24 nt, Human
ccgcccagguucaagcgauucucc

SEQ ID NO: 1380571 - RNA, 22 nt, Human
ccgcccccacaacaggccccgg

SEQ ID NO: 1380572 - RNA, 23 nt, Human
ccugccucagccucccgaguagc

SEQ ID NO: 1380573 - RNA, 24 nt, Human
ccugccucagccucccgaguagcu

SEQ ID NO: 1380574 - RNA, 26 nt, Human
cuacugcacucccuucuccccaaguc

SEQ ID NO: 1380575 - RNA, 18 nt, Human
cucacugcaaccucugcc

SEQ ID NO: 1380576 - RNA, 23 nt, Human
cucagccucccgaguagcuggga

SEQ ID NO: 1380577 - RNA, 23 nt, Human
cucaggcccucuguuucuaccuc

SEQ ID NO: 1380578 - RNA, 24 nt, Human
cugcaaccucugccgcccagguuc

SEQ ID NO: 1380579 - RNA, 24 nt, Human
cugcacccauuaacucgucauuua

SEQ ID NO: 1380580 - RNA, 23 nt, Human
cugccucggccucccaaagugcu

SEQ ID NO: 1380581 - RNA, 22 nt, Human
gaccuugugaucugccugccuc

SEQ ID NO: 1380582 - RNA, 24 nt, Human
gaccuugugaucugccugccucgg

SEQ ID NO: 1380583 - RNA, 20 nt, Human
gagacggaguuuccccaugu

SEQ ID NO: 1380584 - RNA, 26 nt, Human
gaguagcugggauuacaggugcauac

SEQ ID NO: 1380585 - RNA, 18 nt, Human
gauaacaggcgugagcca

SEQ ID NO: 1380586 - RNA, 22 nt, Human
gauaacaggcgugagccacugc

SEQ ID NO: 1380587 - RNA, 22 nt, Human
gauaacaggcgugagccacugc

SEQ ID NO: 1380588 - RNA, 20 nt, Human
gaugcaaggugguagagagc

SEQ ID NO: 1380589 - RNA, 22 nt, Human
gcaaccucugccgcccagguuc

SEQ ID NO: 1380590 - RNA, 21 nt, Human
gcaaggugguagagagcagau

SEQ ID NO: 1380591 - RNA, 24 nt, Human
gcccagguucaagcgauucuccug

SEQ ID NO: 1380592 - RNA, 24 nt, Human
gcgauucuccugccucagccuccc

SEQ ID NO: 1380593 - RNA, 18 nt, Human
gcgugaucuugacucacu

SEQ ID NO: 1380594 - RNA, 22 nt, Human
gcuuucccucccccgcccccac

SEQ ID NO: 1380595 - RNA, 23 nt, Human
ggaguuuccccauguuggccagg

SEQ ID NO: 1380596 - RNA, 22 nt, Human
ggcuguagugcaguggcgugau

SEQ ID NO: 1380597 - RNA, 18 nt, Human
ggguacgugugcacaacg

SEQ ID NO: 1380598 - RNA, 18 nt, Human
guagcugggauuacaggu

SEQ ID NO: 1380599 - RNA, 24 nt, Human
guccaggcuguagugcaguggcgu

SEQ ID NO: 1380600 - RNA, 26 nt, Human
uaacagaagcacuuccagaagaauuc

SEQ ID NO: 1380601 - RNA, 19 nt, Human
uaacagaugcaagguggua

SEQ ID NO: 1380602 - RNA, 24 nt, Human
uaacuacugcacucccuucucccc

SEQ ID NO: 1380603 - RNA, 24 nt, Human
uaauuuuuguauuuuuaguagaga

SEQ ID NO: 1380604 - RNA, 21 nt, Human
uacugcacucccuucucccca

SEQ ID NO: 1380605 - RNA, 21 nt, Human
uaggaaaaaaucuagcuucua

SEQ ID NO: 1380606 - RNA, 24 nt, Human
uaguagagacggaguuuccccaug

SEQ ID NO: 1380607 - RNA, 23 nt, Human
uauaaacacugcuaacccagaug

SEQ ID NO: 1380608 - RNA, 20 nt, Human
ucaaaccagcagccagaggc

SEQ ID NO: 1380609 - RNA, 18 nt, Human
ucacugcaaccucugccg

SEQ ID NO: 1380610 - RNA, 21 nt, Human
ucacugcaaccucugccgccc

SEQ ID NO: 1380611 - RNA, 24 nt, Human
ucacugcaaccucugccgcccagg

SEQ ID NO: 1380612 - RNA, 20 nt, Human
ucagccucccgaguagcugg

SEQ ID NO: 1380613 - RNA, 24 nt, Human
ucccaaagugcugggauaacaggc

SEQ ID NO: 1380614 - RNA, 23 nt, Human
ucccgaguagcugggauuacagg

SEQ ID NO: 1380615 - RNA, 24 nt, Human
ucccgaguagcugggauuacaggu

SEQ ID NO: 1380616 - RNA, 18 nt, Human
ucggccucccaaagugcu

SEQ ID NO: 1380617 - RNA, 24 nt, Human
ucguccaggcuguagugcaguggc

SEQ ID NO: 1380618 - RNA, 21 nt, Human
ucuccucacucauauuucaaa

SEQ ID NO: 1380619 - RNA, 24 nt, Human
ucuccugccucagccucccgagua

SEQ ID NO: 1380620 - RNA, 19 nt, Human
ucugcugggagagauaggg

SEQ ID NO: 1380621 - RNA, 24 nt, Human
ucugucguccaggcuguagugcag

SEQ ID NO: 1380622 - RNA, 19 nt, Human
ucuugcucugucguccagg

SEQ ID NO: 1380623 - RNA, 22 nt, Human
ucuugcucugucguccaggcug

SEQ ID NO: 1380624 - RNA, 23 nt, Human
ucuugcucugucguccaggcugu

SEQ ID NO: 1380625 - RNA, 18 nt, Human
ugagacagagucuugcuc

SEQ ID NO: 1380626 - RNA, 22 nt, Human
ugagacagagucuugcucuguc

SEQ ID NO: 1380627 - RNA, 21 nt, Human
ugcagguuuguuacauaugua

SEQ ID NO: 1380628 - RNA, 24 nt, Human
ugccucagccucccgaguagcugg

SEQ ID NO: 1380629 - RNA, 21 nt, Human
ugccucggccucccaaagugc

SEQ ID NO: 1380630 - RNA, 24 nt, Human
ugccucggccucccaaagugcugg

SEQ ID NO: 1380631 - RNA, 21 nt, Human
ugcgccuggccuacuuaguuu

SEQ ID NO: 1380632 - RNA, 24 nt, Human
ugcucugucguccaggcuguagug

SEQ ID NO: 1380633 - RNA, 22 nt, Human
uggccaggauggucucgaucuc

SEQ ID NO: 1380634 - RNA, 20 nt, Human
ugggagagauagggcugaau

SEQ ID NO: 1380635 - RNA, 19 nt, Human
ugggauaacaggcgugagc

SEQ ID NO: 1380636 - RNA, 22 nt, Human
ugggauaacaggcgugagccac

SEQ ID NO: 1380637 - RNA, 22 nt, Human
ugggauaacaggcgugagccac

SEQ ID NO: 1380638 - RNA, 24 nt, Human
ugggauaacaggcgugagccacug

SEQ ID NO: 1380639 - RNA, 21 nt, Human
ugggauuacaggugcauacca

SEQ ID NO: 1380640 - RNA, 21 nt, Human
ugggauuacaggugcauacca

SEQ ID NO: 1380641 - RNA, 22 nt, Human
ugggauuacaggugcauaccau

SEQ ID NO: 1380642 - RNA, 24 nt, Human
ugggauuacaggugcauaccauca

SEQ ID NO: 1380643 - RNA, 21 nt, Human
ugguagagagcagauuaggaa

SEQ ID NO: 1380644 - RNA, 19 nt, Human
uguagugcaguggcgugau

SEQ ID NO: 1380645 - RNA, 19 nt, Human
uguagugcaguggcgugau

SEQ ID NO: 1380646 - RNA, 28 nt, Human
uguagugcaguggcgugauggcucuagc

SEQ ID NO: 1380647 - RNA, 18 nt, Human
uguuacauauguauacau

SEQ ID NO: 1380648 - RNA, 19 nt, Human
uguuacauauguauacaug

SEQ ID NO: 1380649 - RNA, 18 nt, Human
uuaguagagacggaguuu

SEQ ID NO: 1380650 - RNA, 24 nt, Human
uuaguagagacggaguuuccccau

SEQ ID NO: 1380651 - RNA, 21 nt, Human
uucaagcgauucuccugccuc

SEQ ID NO: 1380652 - RNA, 23 nt, Human
uucaagcgauucuccugccucag

SEQ ID NO: 1380653 - RNA, 24 nt, Human
uucaagcgauucuccugccucagc

SEQ ID NO: 1380654 - RNA, 23 nt, Human
uuguauuuuuaguagagacggag

SEQ ID NO: 1380655 - RNA, 25 nt, Human
uuuauucaaacuaagucaugaaauc

SEQ ID NO: 1380656 - RNA, 19 nt, Human
uuuccccauguuggccagg

SEQ ID NO: 1380657 - RNA, 19 nt, Human
uuuuuaguagagacggagu

SEQ ID NO: 1380658 - RNA, 20 nt, Human
uuuuuguauuuuuaguagag

SEQ ID NO: 1380659 - RNA, 20 nt, Human
uuuuuuuuuuugagacagag

SEQ ID NO: 1380660 - RNA, 24 nt, Human
uuuuuuuuuuuugagacagagucu

SEQ ID NO: 1380661 - RNA, 20 nt, Human
aaagaguccccaauuuacag

SEQ ID NO: 1380662 - RNA, 18 nt, Human
aaagugcugggauuacag

SEQ ID NO: 1380663 - RNA, 18 nt, Human
aacaacagcaaccaaaag

SEQ ID NO: 1380664 - RNA, 19 nt, Human
aacaacagcaaccaaaaga

SEQ ID NO: 1380665 - RNA, 26 nt, Human
aagugcugggauuacagccacgagcu

SEQ ID NO: 1380666 - RNA, 24 nt, Human
acacaggcuggagugcagugguau

SEQ ID NO: 1380667 - RNA, 22 nt, Human
aggagggaggcugcccucuuua

SEQ ID NO: 1380668 - RNA, 23 nt, Human
agugcagugguaugcucauagcu

SEQ ID NO: 1380669 - RNA, 24 nt, Human
agugcugggauuacagccacgagc

SEQ ID NO: 1380670 - RNA, 18 nt, Human
auagcucacugcagccuc

SEQ ID NO: 1380671 - RNA, 19 nt, Human
caaagguuucauaaaggca

SEQ ID NO: 1380672 - RNA, 20 nt, Human
cagccucgaacuccugggcu

SEQ ID NO: 1380673 - RNA, 24 nt, Human
cagccucgaacuccugggcucaaa

SEQ ID NO: 1380674 - RNA, 20 nt, Human
caggaaaagcugcaguaggu

SEQ ID NO: 1380675 - RNA, 23 nt, Human
caggaaaagcugcaguagguggc

SEQ ID NO: 1380676 - RNA, 21 nt, Human
cauuucagacagguacaucgu

SEQ ID NO: 1380677 - RNA, 19 nt, Human
ccacacccagccaagggca

SEQ ID NO: 1380678 - RNA, 21 nt, Human
cccaauauaaucagcaaaaca

SEQ ID NO: 1380679 - RNA, 21 nt, Human
cccacucuguuucuuauuugg

SEQ ID NO: 1380680 - RNA, 22 nt, Human
ccgagcucgcgcuggcuccggc

SEQ ID NO: 1380681 - RNA, 22 nt, Human
ccggcggagccgcugcucuccc

SEQ ID NO: 1380682 - RNA, 19 nt, Human
ccucgaacuccugggcuca

SEQ ID NO: 1380683 - RNA, 25 nt, Human
cgaacuccugggcucaaacgauccu

SEQ ID NO: 1380684 - RNA, 21 nt, Human
cgagcuaccacacccagccaa

SEQ ID NO: 1380685 - RNA, 22 nt, Human
cggaccggguguccaccgugcc

SEQ ID NO: 1380686 - RNA, 24 nt, Human
cgggcaccagccggcuugccggcc

SEQ ID NO: 1380687 - RNA, 19 nt, Human
cuaaagugcugggauuaca

SEQ ID NO: 1380688 - RNA, 21 nt, Human
cucacugcagccucgaacucc

SEQ ID NO: 1380689 - RNA, 24 nt, Human
cucacugcagccucgaacuccugg

SEQ ID NO: 1380690 - RNA, 18 nt, Human
gagcucgcgcuggcuccg

SEQ ID NO: 1380691 - RNA, 20 nt, Human
gaguccccaauuuacagucc

SEQ ID NO: 1380692 - RNA, 20 nt, Human
gccuggguguggggucuugg

SEQ ID NO: 1380693 - RNA, 22 nt, Human
gccuuggcuuccuaaagugcug

SEQ ID NO: 1380694 - RNA, 19 nt, Human
ggcucuuucacacaggcug

SEQ ID NO: 1380695 - RNA, 23 nt, Human
uaaagugcugggauuacagccac

SEQ ID NO: 1380696 - RNA, 20 nt, Human
uaacaacagcaaccaaaaga

SEQ ID NO: 1380697 - RNA, 24 nt, Human
uaacaacagcaaccaaaagacuga

SEQ ID NO: 1380698 - RNA, 24 nt, Human
uacagccacgagcuaccacaccca

SEQ ID NO: 1380699 - RNA, 20 nt, Human
uaccacacccagccaagggc

SEQ ID NO: 1380700 - RNA, 24 nt, Human
uagcucacugcagccucgaacucc

SEQ ID NO: 1380701 - RNA, 24 nt, Human
ucacugcagccucgaacuccuggg

SEQ ID NO: 1380702 - RNA, 23 nt, Human
uccuaaagugcugggauuacagc

SEQ ID NO: 1380703 - RNA, 20 nt, Human
uccugggcucaaacgauccu

SEQ ID NO: 1380704 - RNA, 23 nt, Human
ucuggcucuuucacacaggcugg

SEQ ID NO: 1380705 - RNA, 18 nt, Human
ugccccaggcccuccagg

SEQ ID NO: 1380706 - RNA, 21 nt, Human
uggagugcagugguaugcuca

SEQ ID NO: 1380707 - RNA, 23 nt, Human
uggauugagccugucuuugaagu

SEQ ID NO: 1380708 - RNA, 22 nt, Human
ugggauuacagccacgagcuac

SEQ ID NO: 1380709 - RNA, 24 nt, Human
ugggauuacagccacgagcuacca

SEQ ID NO: 1380710 - RNA, 24 nt, Human
ugguaugcucauagcucacugcag

SEQ ID NO: 1380711 - RNA, 21 nt, Human
uuucacacaggcuggagugca

SEQ ID NO: 1380712 - RNA, 21 nt, Human
aaaagcaccagucuccaugcc

SEQ ID NO: 1380713 - RNA, 23 nt, Human
aaacaauuuucucacacaaaacu

SEQ ID NO: 1380714 - RNA, 21 nt, Human
aaacugccuacucaagccuca

SEQ ID NO: 1380715 - RNA, 21 nt, Human
aacaaaguuuuauuaccccca

SEQ ID NO: 1380716 - RNA, 25 nt, Human
aaccaaucccagugagaugaaccgg

SEQ ID NO: 1380717 - RNA, 21 nt, Human
aagaacaguaaaauaaccaac

SEQ ID NO: 1380718 - RNA, 20 nt, Human
aagacucuguggaucagcca

SEQ ID NO: 1380719 - RNA, 23 nt, Human
acaaaauugcaugaggcucaaaa

SEQ ID NO: 1380720 - RNA, 20 nt, Human
acagguauuaacugauuacu

SEQ ID NO: 1380721 - RNA, 20 nt, Human
acccuagaaguaaaagacuc

SEQ ID NO: 1380722 - RNA, 20 nt, Human
accgccuccccaccaaaauc

SEQ ID NO: 1380723 - RNA, 18 nt, Human
accuggcccacuuaauaa

SEQ ID NO: 1380724 - RNA, 23 nt, Human
acuaaaugcuucuucauuauccc

SEQ ID NO: 1380725 - RNA, 22 nt, Human
acuauguuauuacuaaagcauu

SEQ ID NO: 1380726 - RNA, 19 nt, Human
acuggggcugcugccuuuc

SEQ ID NO: 1380727 - RNA, 19 nt, Human
acugugcugggagauccgu

SEQ ID NO: 1380728 - RNA, 24 nt, Human
agaaaucaacaagccaaauaucau

SEQ ID NO: 1380729 - RNA, 21 nt, Human
agaacuucaaauguguuacua

SEQ ID NO: 1380730 - RNA, 24 nt, Human
agaagcacggcaugaaaagcacca

SEQ ID NO: 1380731 - RNA, 18 nt, Human
agaauccaaggucuuggc

SEQ ID NO: 1380732 - RNA, 21 nt, Human
agaauccaaggucuuggcccc

SEQ ID NO: 1380733 - RNA, 21 nt, Human
agacuauaucagaggaagcaa

SEQ ID NO: 1380734 - RNA, 18 nt, Human
agccacaucuaccucccc

SEQ ID NO: 1380735 - RNA, 18 nt, Human
agccagaacuucaaaugu

SEQ ID NO: 1380736 - RNA, 21 nt, Human
agccagaacuucaaauguguu

SEQ ID NO: 1380737 - RNA, 22 nt, Human
agcuuccuugcauuggguuaga

SEQ ID NO: 1380738 - RNA, 19 nt, Human
agcuuuguaaccucaaguu

SEQ ID NO: 1380739 - RNA, 21 nt, Human
aggcaggaacguuaaagucug

SEQ ID NO: 1380740 - RNA, 23 nt, Human
agguauucugauuuuuggaauuu

SEQ ID NO: 1380741 - RNA, 22 nt, Human
aguaggcaauaaguuuuuaaac

SEQ ID NO: 1380742 - RNA, 21 nt, Human
auaaaauguuucaugucuuca

SEQ ID NO: 1380743 - RNA, 21 nt, Human
auacugcaacaacuucauuua

SEQ ID NO: 1380744 - RNA, 21 nt, Human
aucuaccuuuggucuuugcug

SEQ ID NO: 1380745 - RNA, 23 nt, Human
aucucauuuaucuuugaaauucc

SEQ ID NO: 1380746 - RNA, 18 nt, Human
augcagucauuacagaug

SEQ ID NO: 1380747 - RNA, 18 nt, Human
auggaagacaaccucugc

SEQ ID NO: 1380748 - RNA, 20 nt, Human
auuuaucuaccuuuggucuu

SEQ ID NO: 1380749 - RNA, 23 nt, Human
caaaacagacuaagugccagcca

SEQ ID NO: 1380750 - RNA, 22 nt, Human
caaaauugcaugaggcucaaaa

SEQ ID NO: 1380751 - RNA, 23 nt, Human
caagaacaguaaaauaaccaaca

SEQ ID NO: 1380752 - RNA, 19 nt, Human
caccaaaaucugcagaagc

SEQ ID NO: 1380753 - RNA, 19 nt, Human
caccaagaaauaaagucaa

SEQ ID NO: 1380754 - RNA, 20 nt, Human
cacugggagcugcagaccag

SEQ ID NO: 1380755 - RNA, 21 nt, Human
cacuucaggaaaaugcaagaa

SEQ ID NO: 1380756 - RNA, 21 nt, Human
cagagauucucuuagagcuga

SEQ ID NO: 1380757 - RNA, 18 nt, Human
cagccaucuugccuggga

SEQ ID NO: 1380758 - RNA, 23 nt, Human
cauucuuuacauaaguacugagu

SEQ ID NO: 1380759 - RNA, 23 nt, Human
cauuuccacaccaagaaauaaag

SEQ ID NO: 1380760 - RNA, 22 nt, Human
ccaaauaucauuacaaugugcu

SEQ ID NO: 1380761 - RNA, 21 nt, Human
ccaagcuagagugucccaggu

SEQ ID NO: 1380762 - RNA, 21 nt, Human
ccacaucuaccuccccacuga

SEQ ID NO: 1380763 - RNA, 22 nt, Human
ccaccuugacccuagaaguaaa

SEQ ID NO: 1380764 - RNA, 23 nt, Human
ccacuagacugcagccacugugc

SEQ ID NO: 1380765 - RNA, 21 nt, Human
ccacugugcuuacaguugcgu

SEQ ID NO: 1380766 - RNA, 25 nt, Human
cccacacaaucaagaacaguauaua

SEQ ID NO: 1380767 - RNA, 18 nt, Human
cccuagagaucaaaaacc

SEQ ID NO: 1380768 - RNA, 21 nt, Human
cccuauuaccgccuccccacc

SEQ ID NO: 1380769 - RNA, 23 nt, Human
ccucagccacaucuaccucccca

SEQ ID NO: 1380770 - RNA, 22 nt, Human
ccugaccaguguugcccaggga

SEQ ID NO: 1380771 - RNA, 20 nt, Human
ccugcaggugcucuguccca

SEQ ID NO: 1380772 - RNA, 22 nt, Human
cgccuucuguguuggucucacu

SEQ ID NO: 1380773 - RNA, 19 nt, Human
cuaagcaccacuguuuuac

SEQ ID NO: 1380774 - RNA, 20 nt, Human
cucaccauaaccaacaagac

SEQ ID NO: 1380775 - RNA, 21 nt, Human
cuccucagccacaucuaccuc

SEQ ID NO: 1380776 - RNA, 22 nt, Human
cucuucuuccaaccugcucucc

SEQ ID NO: 1380777 - RNA, 20 nt, Human
cugaagcugcgccuacagcc

SEQ ID NO: 1380778 - RNA, 21 nt, Human
cugauauccuuucuuucacuu

SEQ ID NO: 1380779 - RNA, 23 nt, Human
cugcaguggacuccacacagucc

SEQ ID NO: 1380780 - RNA, 18 nt, Human
cuguguaggaggaagcag

SEQ ID NO: 1380781 - RNA, 21 nt, Human
cuuacaguugcguagagcacu

SEQ ID NO: 1380782 - RNA, 22 nt, Human
cuuccaagcuagagugucccag

SEQ ID NO: 1380783 - RNA, 19 nt, Human
cuuggcucccuggcuucag

SEQ ID NO: 1380784 - RNA, 27 nt, Human
cuuucuuucagagaugcccugcccaga

SEQ ID NO: 1380785 - RNA, 24 nt, Human
gaagacagccacaugggacuugaa

SEQ ID NO: 1380786 - RNA, 24 nt, Human
gaagcacggcaugaaaagcaccag

SEQ ID NO: 1380787 - RNA, 21 nt, Human
gagccaugaaucaaucauuua

SEQ ID NO: 1380788 - RNA, 25 nt, Human
gaggauaaccugauacugagcuuug

SEQ ID NO: 1380789 - RNA, 22 nt, Human
ggaaaugaggauuacagaggaa

SEQ ID NO: 1380790 - RNA, 18 nt, Human
ggaagacaaccucugcag

SEQ ID NO: 1380791 - RNA, 20 nt, Human
ggagccaauaauuguaaguc

SEQ ID NO: 1380792 - RNA, 20 nt, Human
ggcacugucauccuucuuau

SEQ ID NO: 1380793 - RNA, 22 nt, Human
guagaacacuucuguacacccc

SEQ ID NO: 1380794 - RNA, 21 nt, Human
guagaagacgccuuaccugug

SEQ ID NO: 1380795 - RNA, 24 nt, Human
gucaauuucagacugcugugcugg

SEQ ID NO: 1380796 - RNA, 26 nt, Human
guuucuaguggaguggaaaucaaguu

SEQ ID NO: 1380797 - RNA, 20 nt, Human
uaaaaaaaguuuaccuucag

SEQ ID NO: 1380798 - RNA, 22 nt, Human
uaaaauaaccaacaugcaguua

SEQ ID NO: 1380799 - RNA, 24 nt, Human
uaaaaugaacaagauagaaagaua

SEQ ID NO: 1380800 - RNA, 23 nt, Human
uaaaguguuuucaaaugagcacu

SEQ ID NO: 1380801 - RNA, 22 nt, Human
uaaauaauuugcucaagucucc

SEQ ID NO: 1380802 - RNA, 19 nt, Human
uaaaugucuacuguugaau

SEQ ID NO: 1380803 - RNA, 21 nt, Human
uaacagucaggccccuuugcu

SEQ ID NO: 1380804 - RNA, 23 nt, Human
uaacucggagcugucugucucuc

SEQ ID NO: 1380805 - RNA, 22 nt, Human
uaagaaaaaagguuuuuuucac

SEQ ID NO: 1380806 - RNA, 21 nt, Human
uaagacauacaaagagaacaa

SEQ ID NO: 1380807 - RNA, 21 nt, Human
uaagcaaaacagacuaagugc

SEQ ID NO: 1380808 - RNA, 23 nt, Human
uaaguaauaagcaaaacagacua

SEQ ID NO: 1380809 - RNA, 25 nt, Human
uaauaagcaaaacagacuaagugcc

SEQ ID NO: 1380810 - RNA, 21 nt, Human
uacagccgccccuuccugcag

SEQ ID NO: 1380811 - RNA, 25 nt, Human
uacauuaagacauacaaagagaaca

SEQ ID NO: 1380812 - RNA, 23 nt, Human
uacccccauuuuagagucgagga

SEQ ID NO: 1380813 - RNA, 22 nt, Human
uagaaagauagauuuguagaua

SEQ ID NO: 1380814 - RNA, 19 nt, Human
uagaaggaagacagccaca

SEQ ID NO: 1380815 - RNA, 18 nt, Human
uagacgucccucccccuu

SEQ ID NO: 1380816 - RNA, 22 nt, Human
uagauagauagauagauaggca

SEQ ID NO: 1380817 - RNA, 22 nt, Human
uagauccauucaucugucccuc

SEQ ID NO: 1380818 - RNA, 24 nt, Human
uauaaaguguuuucaaaugagcac

SEQ ID NO: 1380819 - RNA, 22 nt, Human
uaucauuacaaugugcuaccca

SEQ ID NO: 1380820 - RNA, 23 nt, Human
uaugcagucauuacagaugcugu

SEQ ID NO: 1380821 - RNA, 19 nt, Human
uaugcauaucacauaugua

SEQ ID NO: 1380822 - RNA, 19 nt, Human
uaugugugccuauuggcaa

SEQ ID NO: 1380823 - RNA, 22 nt, Human
uauguucuucucuaaacuaguu

SEQ ID NO: 1380824 - RNA, 22 nt, Human
uauuucauuaaguugaucuuca

SEQ ID NO: 1380825 - RNA, 21 nt, Human
ucaaaaauauauggggggaaa

SEQ ID NO: 1380826 - RNA, 21 nt, Human
ucaacaauuggcuuggaacuc

SEQ ID NO: 1380827 - RNA, 21 nt, Human
ucacuugaucaauucagcuau

SEQ ID NO: 1380828 - RNA, 26 nt, Human
ucagacauuacaauuuaaaccaugcc

SEQ ID NO: 1380829 - RNA, 21 nt, Human
ucaguuggaaaugcaaaaauc

SEQ ID NO: 1380830 - RNA, 25 nt, Human
uccacacaguccgaacuuccaggcg

SEQ ID NO: 1380831 - RNA, 20 nt, Human
uccacaccaagaaauaaagu

SEQ ID NO: 1380832 - RNA, 22 nt, Human
uccagggugagcaaauucaaug

SEQ ID NO: 1380833 - RNA, 18 nt, Human
ucccagaggggcaccugc

SEQ ID NO: 1380834 - RNA, 23 nt, Human
ucccagcuagaaagagccagagc

SEQ ID NO: 1380835 - RNA, 22 nt, Human
ucccaggucaauuucagacugc

SEQ ID NO: 1380836 - RNA, 23 nt, Human
uccccuauuaccgccuccccacc

SEQ ID NO: 1380837 - RNA, 22 nt, Human
ucccuaaaaugaacaagauaga

SEQ ID NO: 1380838 - RNA, 22 nt, Human
ucccuaaaaugaacaagauaga

SEQ ID NO: 1380839 - RNA, 22 nt, Human
ucccucccccuuccaagcuaga

SEQ ID NO: 1380840 - RNA, 19 nt, Human
uccucagccacaucuaccu

SEQ ID NO: 1380841 - RNA, 24 nt, Human
ucguguaagauaauucucgacugu

SEQ ID NO: 1380842 - RNA, 19 nt, Human
ucuaaacuaguuauucuag

SEQ ID NO: 1380843 - RNA, 19 nt, Human
ucuauaagcuuugagauuu

SEQ ID NO: 1380844 - RNA, 19 nt, Human
ucucuuagagcugagaaau

SEQ ID NO: 1380845 - RNA, 19 nt, Human
ucugucccuccucagccac

SEQ ID NO: 1380846 - RNA, 24 nt, Human
ucuuucagagaugcccugcccaga

SEQ ID NO: 1380847 - RNA, 19 nt, Human
ugaaacgccgaacauguaa

SEQ ID NO: 1380848 - RNA, 24 nt, Human
ugaauaagucauuuccacaccaag

SEQ ID NO: 1380849 - RNA, 23 nt, Human
ugaauacagaacuaccugugacc

SEQ ID NO: 1380850 - RNA, 22 nt, Human
ugagcaaauucaauguuuucaa

SEQ ID NO: 1380851 - RNA, 22 nt, Human
ugagcaagaccacuuggcuccc

SEQ ID NO: 1380852 - RNA, 22 nt, Human
ugagggaaaugaggauuacaga

SEQ ID NO: 1380853 - RNA, 26 nt, Human
ugagugccugcuauauggaaaaucuu

SEQ ID NO: 1380854 - RNA, 21 nt, Human
ugcaagaauuguuuaugcagu

SEQ ID NO: 1380855 - RNA, 18 nt, Human
ugcaguggacuccacaca

SEQ ID NO: 1380856 - RNA, 23 nt, Human
ugccuauuggcaaaagcagagau

SEQ ID NO: 1380857 - RNA, 21 nt, Human
ugcuacccaggucuguccaaa

SEQ ID NO: 1380858 - RNA, 20 nt, Human
ugcugggagauauuuccccg

SEQ ID NO: 1380859 - RNA, 20 nt, Human
uggaacucuuaggguuacau

SEQ ID NO: 1380860 - RNA, 23 nt, Human
uggaagauaagagguauucugau

SEQ ID NO: 1380861 - RNA, 20 nt, Human
uggcaaagauagaaucucau

SEQ ID NO: 1380862 - RNA, 23 nt, Human
uggcaaagauagaaucucauuua

SEQ ID NO: 1380863 - RNA, 19 nt, Human
uggcaaugcauagggauug

SEQ ID NO: 1380864 - RNA, 23 nt, Human
uggcuccaguguuuuaaacauac

SEQ ID NO: 1380865 - RNA, 20 nt, Human
uggcucccuggcuucagccc

SEQ ID NO: 1380866 - RNA, 20 nt, Human
uggcuuggaacucuuagggu

SEQ ID NO: 1380867 - RNA, 23 nt, Human
ugggcuguguuuuucagcuucau

SEQ ID NO: 1380868 - RNA, 23 nt, Human
uggggcugcugccuuucuuucag

SEQ ID NO: 1380869 - RNA, 22 nt, Human
uggggggaaaaauuccuguaau

SEQ ID NO: 1380870 - RNA, 26 nt, Human
uguaaaaaaaguuuaccuucagcaag

SEQ ID NO: 1380871 - RNA, 18 nt, Human
ugucaaggaaaaguaggc

SEQ ID NO: 1380872 - RNA, 22 nt, Human
ugucaaggaaaaguaggcaaua

SEQ ID NO: 1380873 - RNA, 19 nt, Human
ugucacacaauaugguaca

SEQ ID NO: 1380874 - RNA, 21 nt, Human
ugugaccccaaaauauuucca

SEQ ID NO: 1380875 - RNA, 22 nt, Human
uguuguguuuuuggagcauguu

SEQ ID NO: 1380876 - RNA, 18 nt, Human
uuaaaacaaauugacuca

SEQ ID NO: 1380877 - RNA, 20 nt, Human
uucacccuuuuuaugcugga

SEQ ID NO: 1380878 - RNA, 23 nt, Human
uucagcaagauagucauauauca

SEQ ID NO: 1380879 - RNA, 20 nt, Human
uucaggaaaaugcaagaauu

SEQ ID NO: 1380880 - RNA, 23 nt, Human
uucauuccccuauuaccgccucc

SEQ ID NO: 1380881 - RNA, 24 nt, Human
uuccaacauauacaaucuauugua

SEQ ID NO: 1380882 - RNA, 22 nt, Human
uuccuggucacuaucaugccuu

SEQ ID NO: 1380883 - RNA, 19 nt, Human
uugcuguguauuccuuccu

SEQ ID NO: 1380884 - RNA, 24 nt, Human
uugggcuguguuuuucagcuucau

SEQ ID NO: 1380885 - RNA, 20 nt, Human
uuggugaccuuaggaugaag

SEQ ID NO: 1380886 - RNA, 20 nt, Human
uuuaaaaugaacacuucagg

SEQ ID NO: 1380887 - RNA, 23 nt, Human
uuuauguucuucucuaaacuagu

SEQ ID NO: 1380888 - RNA, 21 nt, Human
uuuguugaaaggcaguccaga

SEQ ID NO: 1380889 - RNA, 20 nt, Human
uuuuaugcuggauuuuccuc

SEQ ID NO: 1380890 - RNA, 18 nt, Human
uuuucagcuucaucaggu

SEQ ID NO: 1380891 - RNA, 19 nt, Human
gcugagcacacaggaaacc

SEQ ID NO: 1380892 - RNA, 19 nt, Human
gucuccuuggcuaguaguu

SEQ ID NO: 1380893 - RNA, 21 nt, Human
uagcugaugugcaauugaggc

SEQ ID NO: 1380894 - RNA, 26 nt, Human
ucuaaaagccuuauuuccucaucucu

SEQ ID NO: 1380895 - RNA, 23 nt, Human
ucucucgucauuuuguuugcaaa

SEQ ID NO: 1380896 - RNA, 23 nt, Human
ugaacgaucauuauuuaguccca

SEQ ID NO: 1380897 - RNA, 19 nt, Human
ugaccaaaauggauccuac

SEQ ID NO: 1380898 - RNA, 23 nt, Human
uuugacagaugaccaaaauggau

SEQ ID NO: 1380899 - RNA, 20 nt, Human
uuugcaaacugucuaaaagc

SEQ ID NO: 1380900 - RNA, 27 nt, Human
aacacucugccuggccaggcccugcua

SEQ ID NO: 1380901 - RNA, 21 nt, Human
aacccugcucaagcacguggu

SEQ ID NO: 1380902 - RNA, 19 nt, Human
accucuaggucuccauccc

SEQ ID NO: 1380903 - RNA, 18 nt, Human
caaagcccaacaccaagg

SEQ ID NO: 1380904 - RNA, 18 nt, Human
caaggggccccucuggga

SEQ ID NO: 1380905 - RNA, 19 nt, Human
caccgccuuuccagcugcc

SEQ ID NO: 1380906 - RNA, 21 nt, Human
caggcccugcuaaggggcaga

SEQ ID NO: 1380907 - RNA, 24 nt, Human
caguccacccaucuuugguggccu

SEQ ID NO: 1380908 - RNA, 22 nt, Human
cccaccgacgaaagggagcagg

SEQ ID NO: 1380909 - RNA, 19 nt, Human
ccccaccucuaggucucca

SEQ ID NO: 1380910 - RNA, 22 nt, Human
cccccacaggucuaggccccug

SEQ ID NO: 1380911 - RNA, 20 nt, Human
cccccaccucuaggucucca

SEQ ID NO: 1380912 - RNA, 19 nt, Human
ccccucugggagguggccu

SEQ ID NO: 1380913 - RNA, 21 nt, Human
ccccucugggagguggccuaa

SEQ ID NO: 1380914 - RNA, 22 nt, Human
ccccuggggcucaggccuccug

SEQ ID NO: 1380915 - RNA, 21 nt, Human
cccgcugcccccacaggucua

SEQ ID NO: 1380916 - RNA, 19 nt, Human
ccucuaggucuccaucccc

SEQ ID NO: 1380917 - RNA, 22 nt, Human
ccucugggagguggccuaaccc

SEQ ID NO: 1380918 - RNA, 21 nt, Human
ccugcaccgccuuuccagcug

SEQ ID NO: 1380919 - RNA, 20 nt, Human
cggcgggugcugaagcgcgg

SEQ ID NO: 1380920 - RNA, 20 nt, Human
cuaacccugcucaagcacgu

SEQ ID NO: 1380921 - RNA, 22 nt, Human
cuccuuugacccugggccaggg

SEQ ID NO: 1380922 - RNA, 23 nt, Human
cucuccuuugacccugggccagg

SEQ ID NO: 1380923 - RNA, 24 nt, Human
cugaagcgcggccgaccaagccca

SEQ ID NO: 1380924 - RNA, 21 nt, Human
cugcaccgccuuuccagcugc

SEQ ID NO: 1380925 - RNA, 23 nt, Human
cuuccucccuggggcucgggugg

SEQ ID NO: 1380926 - RNA, 19 nt, Human
cuuggguaagccccggcuc

SEQ ID NO: 1380927 - RNA, 22 nt, Human
gaaggaauggaggcucaggccu

SEQ ID NO: 1380928 - RNA, 23 nt, Human
gaagggccuccauuccuucuguu

SEQ ID NO: 1380929 - RNA, 22 nt, Human
gacccugcggccagaggcuugg

SEQ ID NO: 1380930 - RNA, 23 nt, Human
gaggcagcagugccugggggugg

SEQ ID NO: 1380931 - RNA, 19 nt, Human
gcaccgccuuuccagcugc

SEQ ID NO: 1380932 - RNA, 18 nt, Human
gccaucucuccuuugacc

SEQ ID NO: 1380933 - RNA, 22 nt, Human
gcccccaccucuaggucuccau

SEQ ID NO: 1380934 - RNA, 19 nt, Human
gccuccaguccacccaucu

SEQ ID NO: 1380935 - RNA, 24 nt, Human
gccuccauuccuucuguuccccau

SEQ ID NO: 1380936 - RNA, 18 nt, Human
gccugcaccgccuuucca

SEQ ID NO: 1380937 - RNA, 25 nt, Human
ggccagaggcuuggccuccugccag

SEQ ID NO: 1380938 - RNA, 21 nt, Human
gggcagagacugaaggcuggg

SEQ ID NO: 1380939 - RNA, 18 nt, Human
ggggcucggguggccuca

SEQ ID NO: 1380940 - RNA, 18 nt, Human
gugggcuuggccaggcgg

SEQ ID NO: 1380941 - RNA, 19 nt, Human
gugguccuggagaagccca

SEQ ID NO: 1380942 - RNA, 18 nt, Human
ucaagcacgugguccugg

SEQ ID NO: 1380943 - RNA, 25 nt, Human
ucaguggccaaggcaggccgggguc

SEQ ID NO: 1380944 - RNA, 19 nt, Human
ucccggacccauggggccc

SEQ ID NO: 1380945 - RNA, 19 nt, Human
ucccggacccauggggccc

SEQ ID NO: 1380946 - RNA, 18 nt, Human
ucccuggggcucgggugg

SEQ ID NO: 1380947 - RNA, 19 nt, Human
ucccuggggcucggguggc

SEQ ID NO: 1380948 - RNA, 22 nt, Human
ucccuggggcucggguggccuc

SEQ ID NO: 1380949 - RNA, 18 nt, Human
uccucccuggggcucggg

SEQ ID NO: 1380950 - RNA, 22 nt, Human
ugaagcgcggccgaccaagccc

SEQ ID NO: 1380951 - RNA, 21 nt, Human
ugacccugggccaggggcugg

SEQ ID NO: 1380952 - RNA, 23 nt, Human
ugacccugggccaggggcugggg

SEQ ID NO: 1380953 - RNA, 20 nt, Human
ugaggugcaugcaugcgggg

SEQ ID NO: 1380954 - RNA, 21 nt, Human
ugcaaagcccaacaccaaggg

SEQ ID NO: 1380955 - RNA, 19 nt, Human
ugcaugcgggggaggggcu

SEQ ID NO: 1380956 - RNA, 20 nt, Human
uggccaggcccugcuaaggg

SEQ ID NO: 1380957 - RNA, 19 nt, Human
uggcgacagggggacaggg

SEQ ID NO: 1380958 - RNA, 18 nt, Human
ugggagggagagcagugg

SEQ ID NO: 1380959 - RNA, 21 nt, Human
ugggccaagggaagccuucag

SEQ ID NO: 1380960 - RNA, 21 nt, Human
uggggaaggaauggaggcuca

SEQ ID NO: 1380961 - RNA, 20 nt, Human
ugggggugggcugcgaucug

SEQ ID NO: 1380962 - RNA, 27 nt, Human
uuuccagcugccuccaguccacccauc

SEQ ID NO: 1380963 - RNA, 19 nt, Human
uuugacccugggccagggg

SEQ ID NO: 1380964 - RNA, 20 nt, Human
uuugacccugggccaggggc

SEQ ID NO: 1380965 - RNA, 20 nt, Human
caaagugggaucagugaauc

SEQ ID NO: 1380966 - RNA, 23 nt, Human
caaaugauuuuuuucacagccca

SEQ ID NO: 1380967 - RNA, 25 nt, Human
ccagcaauucuggcuggugauguca

SEQ ID NO: 1380968 - RNA, 20 nt, Human
gcuggugaugucacaaugac

SEQ ID NO: 1380969 - RNA, 21 nt, Human
guccuuguaucacgacaucag

SEQ ID NO: 1380970 - RNA, 24 nt, Human
uaaauaaauguacagccccccaag

SEQ ID NO: 1380971 - RNA, 25 nt, Human
uaaauaaauguacagccccccaaga

SEQ ID NO: 1380972 - RNA, 19 nt, Human
aaagugcuaggauugcugg

SEQ ID NO: 1380973 - RNA, 24 nt, Human
aaagugcuaggauugcuggcauga

SEQ ID NO: 1380974 - RNA, 22 nt, Human
aagcagccaccugugcccucug

SEQ ID NO: 1380975 - RNA, 25 nt, Human
aagcgauccucccacuucagccucc

SEQ ID NO: 1380976 - RNA, 20 nt, Human
aaggcaguccuaaaccuuga

SEQ ID NO: 1380977 - RNA, 20 nt, Human
aaguagcugggacuagaggc

SEQ ID NO: 1380978 - RNA, 24 nt, Human
aaguagcugggacuagaggcacgc

SEQ ID NO: 1380979 - RNA, 26 nt, Human
aagugcuaggauugcuggcaugagcc

SEQ ID NO: 1380980 - RNA, 23 nt, Human
acaacuuccagaggcccaauccu

SEQ ID NO: 1380981 - RNA, 22 nt, Human
acagcaaaggcaggcucccaaa

SEQ ID NO: 1380982 - RNA, 23 nt, Human
acccaggcuggagugcaguggug

SEQ ID NO: 1380983 - RNA, 23 nt, Human
accucagccucccaaagugcuag

SEQ ID NO: 1380984 - RNA, 22 nt, Human
accugugcccucugggcucucc

SEQ ID NO: 1380985 - RNA, 18 nt, Human
acucugucacccaggcug

SEQ ID NO: 1380986 - RNA, 24 nt, Human
acucugucacccaggcuggagugc

SEQ ID NO: 1380987 - RNA, 23 nt, Human
acuucagccucccaaguagcugg

SEQ ID NO: 1380988 - RNA, 22 nt, Human
agacagagcucuuggcuuugua

SEQ ID NO: 1380989 - RNA, 21 nt, Human
agagugaggaacucagcugau

SEQ ID NO: 1380990 - RNA, 19 nt, Human
aggaauccgugggccaggc

SEQ ID NO: 1380991 - RNA, 18 nt, Human
aggcaaggagucagaccu

SEQ ID NO: 1380992 - RNA, 18 nt, Human
aggcacgcaccaccaucc

SEQ ID NO: 1380993 - RNA, 19 nt, Human
agucaggaggcaaggucag

SEQ ID NO: 1380994 - RNA, 20 nt, Human
agugaggaacucagcugaug

SEQ ID NO: 1380995 - RNA, 20 nt, Human
agugcaguggugcuaucaug

SEQ ID NO: 1380996 - RNA, 22 nt, Human
aucccuccccccuccucccacc

SEQ ID NO: 1380997 - RNA, 21 nt, Human
auguucuagaaggaauccgug

SEQ ID NO: 1380998 - RNA, 24 nt, Human
caaacuccugggcucaagcaaccu

SEQ ID NO: 1380999 - RNA, 24 nt, Human
caaagugcuaggauugcuggcaug

SEQ ID NO: 1381000 - RNA, 27 nt, Human
caagcgauccucccacuucagccuccc

SEQ ID NO: 1381001 - RNA, 23 nt, Human
caaguagcugggacuagaggcac

SEQ ID NO: 1381002 - RNA, 22 nt, Human
cacaacaguccccagaguguga

SEQ ID NO: 1381003 - RNA, 20 nt, Human
cacaguggaugccuacugga

SEQ ID NO: 1381004 - RNA, 21 nt, Human
cacccaggcuggagugcagug

SEQ ID NO: 1381005 - RNA, 19 nt, Human
caccccacaacagucccca

SEQ ID NO: 1381006 - RNA, 21 nt, Human
caccccacaacaguccccaga

SEQ ID NO: 1381007 - RNA, 18 nt, Human
cacgcuucccagcagggc

SEQ ID NO: 1381008 - RNA, 23 nt, Human
cacucugucacccaggcuggagu

SEQ ID NO: 1381009 - RNA, 24 nt, Human
cacucugucacccaggcuggagug

SEQ ID NO: 1381010 - RNA, 18 nt, Human
cacugcacccagccucca

SEQ ID NO: 1381011 - RNA, 20 nt, Human
cacugcacccagccuccagc

SEQ ID NO: 1381012 - RNA, 22 nt, Human
cacugcacccagccuccagcuu

SEQ ID NO: 1381013 - RNA, 23 nt, Human
cacugcacccagccuccagcuuu

SEQ ID NO: 1381014 - RNA, 22 nt, Human
cagagguccuucugucuagcuu

SEQ ID NO: 1381015 - RNA, 24 nt, Human
cauguugccucgccuggucucaaa

SEQ ID NO: 1381016 - RNA, 18 nt, Human
cauuagguauaccuccca

SEQ ID NO: 1381017 - RNA, 19 nt, Human
ccaaagugcuaggauugcu

SEQ ID NO: 1381018 - RNA, 24 nt, Human
ccaaagugcuaggauugcuggcau

SEQ ID NO: 1381019 - RNA, 22 nt, Human
ccaaguagcugggacuagaggc

SEQ ID NO: 1381020 - RNA, 19 nt, Human
cccaaguagcugggacuag

SEQ ID NO: 1381021 - RNA, 19 nt, Human
cccaaugcuaucccucccc

SEQ ID NO: 1381022 - RNA, 19 nt, Human
ccccccuccucccacccca

SEQ ID NO: 1381023 - RNA, 21 nt, Human
ccccuaaacuggcuuagcagg

SEQ ID NO: 1381024 - RNA, 26 nt, Human
ccccuccucccaccccacaacagucc

SEQ ID NO: 1381025 - RNA, 19 nt, Human
ccucccaaugcuaucccuc

SEQ ID NO: 1381026 - RNA, 19 nt, Human
ccucccaccccacaacagu

SEQ ID NO: 1381027 - RNA, 26 nt, Human
ccucccacuucagccucccaaguagc

SEQ ID NO: 1381028 - RNA, 20 nt, Human
ccucgggaaagaacagggag

SEQ ID NO: 1381029 - RNA, 21 nt, Human
ccugcucaccucagccuccca

SEQ ID NO: 1381030 - RNA, 18 nt, Human
ccugggcucaagcaaccu

SEQ ID NO: 1381031 - RNA, 20 nt, Human
ccugggcucaagcgauccuc

SEQ ID NO: 1381032 - RNA, 21 nt, Human
ccugggggugaugagcuagug

SEQ ID NO: 1381033 - RNA, 21 nt, Human
ccugugcccucugggcucucc

SEQ ID NO: 1381034 - RNA, 19 nt, Human
cgaggccuggugacuuaaa

SEQ ID NO: 1381035 - RNA, 19 nt, Human
cuaagcagccaccugugcc

SEQ ID NO: 1381036 - RNA, 24 nt, Human
cuaugagugagaauaugcgguguu

SEQ ID NO: 1381037 - RNA, 24 nt, Human
cucaagcgauccucccacuucagc

SEQ ID NO: 1381038 - RNA, 24 nt, Human
cucacucugucacccaggcuggag

SEQ ID NO: 1381039 - RNA, 21 nt, Human
cucacugcagcuuugaacucc

SEQ ID NO: 1381040 - RNA, 24 nt, Human
cucacugcagcuuugaacuccugg

SEQ ID NO: 1381041 - RNA, 22 nt, Human
cuccauggccggccuuucugcc

SEQ ID NO: 1381042 - RNA, 19 nt, Human
cucccaccccacaacaguc

SEQ ID NO: 1381043 - RNA, 19 nt, Human
cuccugggcucaagcaacc

SEQ ID NO: 1381044 - RNA, 23 nt, Human
cuccugggcucaagcgauccucc

SEQ ID NO: 1381045 - RNA, 22 nt, Human
cucuuugaaaacuuagcccaga

SEQ ID NO: 1381046 - RNA, 24 nt, Human
cugcacccacuaacucgucaucua

SEQ ID NO: 1381047 - RNA, 25 nt, Human
cugccaauaugugcugauuauggaa

SEQ ID NO: 1381048 - RNA, 25 nt, Human
cuucagccucccaaguagcugggac

SEQ ID NO: 1381049 - RNA, 23 nt, Human
cuuugaacuccugggcucaagcg

SEQ ID NO: 1381050 - RNA, 18 nt, Human
gagaacaacgaggccugg

SEQ ID NO: 1381051 - RNA, 24 nt, Human
gagaggggaucuugccauguugcc

SEQ ID NO: 1381052 - RNA, 18 nt, Human
gaggacccuggcugaggu

SEQ ID NO: 1381053 - RNA, 21 nt, Human
gagggagacagagcucuuggc

SEQ ID NO: 1381054 - RNA, 22 nt, Human
gaucucauuguucaauucccac

SEQ ID NO: 1381055 - RNA, 23 nt, Human
gauugcuggcaugagccacugca

SEQ ID NO: 1381056 - RNA, 21 nt, Human
gccuagucaagaagagggccc

SEQ ID NO: 1381057 - RNA, 19 nt, Human
gcuggagugcaguggugcu

SEQ ID NO: 1381058 - RNA, 22 nt, Human
ggauugcuggcaugagccacug

SEQ ID NO: 1381059 - RNA, 20 nt, Human
ggcaugagccacugcaccca

SEQ ID NO: 1381060 - RNA, 27 nt, Human
ggccacagagguccuucugucuagcuu

SEQ ID NO: 1381061 - RNA, 21 nt, Human
guagagaggggaucuugccau

SEQ ID NO: 1381062 - RNA, 24 nt, Human
gugcaguggugcuaucaugacuca

SEQ ID NO: 1381063 - RNA, 18 nt, Human
uaaaacaggccaagggug

SEQ ID NO: 1381064 - RNA, 21 nt, Human
uaagagaaauugcacugggca

SEQ ID NO: 1381065 - RNA, 19 nt, Human
uaagcagccaccugugccc

SEQ ID NO: 1381066 - RNA, 20 nt, Human
uaagcagccaccugugcccu

SEQ ID NO: 1381067 - RNA, 22 nt, Human
uagagaggggaucuugccaugu

SEQ ID NO: 1381068 - RNA, 22 nt, Human
uaggauugcuggcaugagccac

SEQ ID NO: 1381069 - RNA, 24 nt, Human
uaggauugcuggcaugagccacug

SEQ ID NO: 1381070 - RNA, 24 nt, Human
uaguuuacugagaaugauagugac

SEQ ID NO: 1381071 - RNA, 19 nt, Human
ucaagcccauguuggccgg

SEQ ID NO: 1381072 - RNA, 18 nt, Human
ucaagggucgggggcauu

SEQ ID NO: 1381073 - RNA, 24 nt, Human
ucacccaggcuggagugcaguggu

SEQ ID NO: 1381074 - RNA, 24 nt, Human
ucaccucagccucccaaagugcua

SEQ ID NO: 1381075 - RNA, 24 nt, Human
ucacucugucacccaggcuggagu

SEQ ID NO: 1381076 - RNA, 24 nt, Human
ucacugcagcuuugaacuccuggg

SEQ ID NO: 1381077 - RNA, 18 nt, Human
ucagccucccaaguagcu

SEQ ID NO: 1381078 - RNA, 20 nt, Human
ucagccucccaaguagcugg

SEQ ID NO: 1381079 - RNA, 20 nt, Human
ucccaaagugcuaggauugc

SEQ ID NO: 1381080 - RNA, 24 nt, Human
ucccaaagugcuaggauugcuggc

SEQ ID NO: 1381081 - RNA, 24 nt, Human
ucccaaguagcugggacuagaggc

SEQ ID NO: 1381082 - RNA, 18 nt, Human
ucccaaugcuaucccucc

SEQ ID NO: 1381083 - RNA, 21 nt, Human
ucccaaugcuaucccuccccc

SEQ ID NO: 1381084 - RNA, 25 nt, Human
ucccaccccacaacaguccccagaa

SEQ ID NO: 1381085 - RNA, 26 nt, Human
ucccaccccacaacaguccccagaag

SEQ ID NO: 1381086 - RNA, 18 nt, Human
uccccccuccucccaccc

SEQ ID NO: 1381087 - RNA, 23 nt, Human
uccccccuccucccaccccacaa

SEQ ID NO: 1381088 - RNA, 18 nt, Human
ucccuccccccuccuccc

SEQ ID NO: 1381089 - RNA, 23 nt, Human
uccucagagcacucagagguggc

SEQ ID NO: 1381090 - RNA, 18 nt, Human
uccucccaccccacaaca

SEQ ID NO: 1381091 - RNA, 19 nt, Human
uccugggcucaagcaaccu

SEQ ID NO: 1381092 - RNA, 21 nt, Human
uccugggcucaagcgauccuc

SEQ ID NO: 1381093 - RNA, 24 nt, Human
uccugggcucaagcgauccuccca

SEQ ID NO: 1381094 - RNA, 21 nt, Human
ucgccuggucucaaacuccug

SEQ ID NO: 1381095 - RNA, 23 nt, Human
ucucaaacuccugggcucaagca

SEQ ID NO: 1381096 - RNA, 23 nt, Human
ucucacucugucacccaggcugg

SEQ ID NO: 1381097 - RNA, 24 nt, Human
ucucacucugucacccaggcugga

SEQ ID NO: 1381098 - RNA, 26 nt, Human
ucucacucugucacccaggcuggagu

SEQ ID NO: 1381099 - RNA, 27 nt, Human
ucucacucugucacccaggcuggagug

SEQ ID NO: 1381100 - RNA, 20 nt, Human
ucuccagcuugggaggggcc

SEQ ID NO: 1381101 - RNA, 24 nt, Human
ucugucacccaggcuggagugcag

SEQ ID NO: 1381102 - RNA, 23 nt, Human
ucuugccauguugccucgccugg

SEQ ID NO: 1381103 - RNA, 20 nt, Human
ugaaaacuuagcccagaaau

SEQ ID NO: 1381104 - RNA, 25 nt, Human
ugaacuccugggcucaagcgauccu

SEQ ID NO: 1381105 - RNA, 21 nt, Human
ugagaacaacgaggccuggug

SEQ ID NO: 1381106 - RNA, 22 nt, Human
ugaggaacucagcugauggaaa

SEQ ID NO: 1381107 - RNA, 19 nt, Human
ugagugagaauaugcggug

SEQ ID NO: 1381108 - RNA, 24 nt, Human
ugagugagaauaugcgguguuugg

SEQ ID NO: 1381109 - RNA, 21 nt, Human
ugcagcuuugaacuccugggc

SEQ ID NO: 1381110 - RNA, 24 nt, Human
ugccauguugccucgccuggucuc

SEQ ID NO: 1381111 - RNA, 19 nt, Human
ugccuacuggagaggggcu

SEQ ID NO: 1381112 - RNA, 23 nt, Human
ugccucgggaaagaacagggagu

SEQ ID NO: 1381113 - RNA, 19 nt, Human
ugcuggcaugagccacugc

SEQ ID NO: 1381114 - RNA, 18 nt, Human
uggaaaauuaaaaagagg

SEQ ID NO: 1381115 - RNA, 23 nt, Human
uggagugcaguggugcuaucaug

SEQ ID NO: 1381116 - RNA, 28 nt, Human
uggagugcaguggugcuauccuagcacg

SEQ ID NO: 1381117 - RNA, 28 nt, Human
uggagugcaguggugcuauggcucuagc

SEQ ID NO: 1381118 - RNA, 18 nt, Human
uggccggaggcuagaggu

SEQ ID NO: 1381119 - RNA, 18 nt, Human
uggccgugagaacaacga

SEQ ID NO: 1381120 - RNA, 18 nt, Human
uggcuuagcaggauucuc

SEQ ID NO: 1381121 - RNA, 24 nt, Human
ugggacuagaggcacgcaccacca

SEQ ID NO: 1381122 - RNA, 23 nt, Human
ugggagggagacagagcucuugg

SEQ ID NO: 1381123 - RNA, 24 nt, Human
ugguagagaggggaucuugccaug

SEQ ID NO: 1381124 - RNA, 23 nt, Human
uguagugagaacaugaauccauu

SEQ ID NO: 1381125 - RNA, 23 nt, Human
ugugcagguuaguuacauaugua

SEQ ID NO: 1381126 - RNA, 20 nt, Human
uguucuagaaggaauccgug

SEQ ID NO: 1381127 - RNA, 24 nt, Human
uuacggccgaaaggcagagugagg

SEQ ID NO: 1381128 - RNA, 22 nt, Human
uuacugagaaugauagugacag

SEQ ID NO: 1381129 - RNA, 20 nt, Human
uuccagaggcccaauccugg

SEQ ID NO: 1381130 - RNA, 23 nt, Human
uugguagagaggggaucuugcca

SEQ ID NO: 1381131 - RNA, 18 nt, Human
uuggucaaggagggaguc

SEQ ID NO: 1381132 - RNA, 22 nt, Human
uuuauacuuuaaguuuuagggu

SEQ ID NO: 1381133 - RNA, 23 nt, Human
uuuuuuuuuuuaggcagggucuc

SEQ ID NO: 1381134 - RNA, 25 nt, Human
uuuuuuuuuuuuaggcagggucuca

SEQ ID NO: 1381135 - RNA, 21 nt, Human
uuuuuuuuuuuuuaggcaggg

SEQ ID NO: 1381136 - RNA, 20 nt, Human
aaaaaugccugcugaaccac

SEQ ID NO: 1381137 - RNA, 20 nt, Human
aaaagcaaguuuauuaagaa

SEQ ID NO: 1381138 - RNA, 25 nt, Human
aaaccaaacaaaacagcaaggagaa

SEQ ID NO: 1381139 - RNA, 21 nt, Human
aaacggagacagcaaccaaga

SEQ ID NO: 1381140 - RNA, 24 nt, Human
aaagugcugggauuacagguguga

SEQ ID NO: 1381141 - RNA, 19 nt, Human
aacaaaacacaaccacauc

SEQ ID NO: 1381142 - RNA, 22 nt, Human
aacaaaacaugcagauccuccc

SEQ ID NO: 1381143 - RNA, 23 nt, Human
aacaaaacaugcagauccuccca

SEQ ID NO: 1381144 - RNA, 19 nt, Human
aacacagagacaacaaaac

SEQ ID NO: 1381145 - RNA, 23 nt, Human
aacagcaaggagaaaaguccccc

SEQ ID NO: 1381146 - RNA, 21 nt, Human
aaccaaacaaaacagcaagga

SEQ ID NO: 1381147 - RNA, 20 nt, Human
aacggagacagcaaccaaga

SEQ ID NO: 1381148 - RNA, 18 nt, Human
aacguauccacccuaggu

SEQ ID NO: 1381149 - RNA, 19 nt, Human
aagaagcugggauuacaga

SEQ ID NO: 1381150 - RNA, 22 nt, Human
aagaagcugggauuacagaugu

SEQ ID NO: 1381151 - RNA, 23 nt, Human
aagcaaacggacagaaaucggga

SEQ ID NO: 1381152 - RNA, 26 nt, Human
aagcaauucuccugccucagccgccc

SEQ ID NO: 1381153 - RNA, 24 nt, Human
aagggguuucaccaugcuggccag

SEQ ID NO: 1381154 - RNA, 18 nt, Human
aagugcugggauuacagg

SEQ ID NO: 1381155 - RNA, 19 nt, Human
aagugcugggauuacaggu

SEQ ID NO: 1381156 - RNA, 26 nt, Human
aagugcugggauuacaggugugagcc

SEQ ID NO: 1381157 - RNA, 25 nt, Human
acaacacagagacaacaaaacaugc

SEQ ID NO: 1381158 - RNA, 21 nt, Human
acagagaagggcguuccugaa

SEQ ID NO: 1381159 - RNA, 24 nt, Human
acaggaaaagggccccgauccaga

SEQ ID NO: 1381160 - RNA, 22 nt, Human
accacaucuaucgaaucuuacu

SEQ ID NO: 1381161 - RNA, 22 nt, Human
accaugcuggccaggcuggucu

SEQ ID NO: 1381162 - RNA, 19 nt, Human
acccaggcuggagugcaau

SEQ ID NO: 1381163 - RNA, 23 nt, Human
acgaaccuucagagcugacagaa

SEQ ID NO: 1381164 - RNA, 20 nt, Human
acgggguuucaacacguugg

SEQ ID NO: 1381165 - RNA, 24 nt, Human
acgggguuucaacacguuggccag

SEQ ID NO: 1381166 - RNA, 19 nt, Human
acggguugcgagccaauac

SEQ ID NO: 1381167 - RNA, 23 nt, Human
acugaaacggagacagcaaccaa

SEQ ID NO: 1381168 - RNA, 21 nt, Human
acugcagugcugcagucuacu

SEQ ID NO: 1381169 - RNA, 22 nt, Human
agaagggcguuccugaaacuaa

SEQ ID NO: 1381170 - RNA, 21 nt, Human
agaagggguuucaccaugcug

SEQ ID NO: 1381171 - RNA, 18 nt, Human
agauaaaccacaacaugg

SEQ ID NO: 1381172 - RNA, 21 nt, Human
agcaauuuuagagccggaucc

SEQ ID NO: 1381173 - RNA, 25 nt, Human
agcacagcagcaacaaaacacaacc

SEQ ID NO: 1381174 - RNA, 18 nt, Human
aggaggacgaggcagacu

SEQ ID NO: 1381175 - RNA, 24 nt, Human
agggguuucaccaugcuggccagg

SEQ ID NO: 1381176 - RNA, 24 nt, Human
aggugaucugccugccucggccuc

SEQ ID NO: 1381177 - RNA, 23 nt, Human
aguaaaguggugaaagaacagcu

SEQ ID NO: 1381178 - RNA, 22 nt, Human
aguagagaagggguuucaccau

SEQ ID NO: 1381179 - RNA, 21 nt, Human
aguaguacucggugggcuaag

SEQ ID NO: 1381180 - RNA, 24 nt, Human
agugauccaccccccucagccucc

SEQ ID NO: 1381181 - RNA, 19 nt, Human
agugcaguggugcaaucuc

SEQ ID NO: 1381182 - RNA, 21 nt, Human
agugcaguggugcaaucucag

SEQ ID NO: 1381183 - RNA, 19 nt, Human
aguugauuucucaaacuca

SEQ ID NO: 1381184 - RNA, 21 nt, Human
auguacucucacagugcccuc

SEQ ID NO: 1381185 - RNA, 24 nt, Human
auguuuguauuuuuaguagagacg

SEQ ID NO: 1381186 - RNA, 23 nt, Human
caaaacaugcagauccucccaag

SEQ ID NO: 1381187 - RNA, 21 nt, Human
caaaaccaaacaaaacagcaa

SEQ ID NO: 1381188 - RNA, 26 nt, Human
caaaauaaaugaagaggauuuagaug

SEQ ID NO: 1381189 - RNA, 25 nt, Human
caaaccagacggagaaaagggaaca

SEQ ID NO: 1381190 - RNA, 20 nt, Human
caaagcaaacacgguuugcc

SEQ ID NO: 1381191 - RNA, 19 nt, Human
caaagucagucuacugacu

SEQ ID NO: 1381192 - RNA, 24 nt, Human
caaagugcugggauuacaggugug

SEQ ID NO: 1381193 - RNA, 24 nt, Human
caacacguuggccaggauggucuc

SEQ ID NO: 1381194 - RNA, 21 nt, Human
caaccaagacaaggaggacga

SEQ ID NO: 1381195 - RNA, 22 nt, Human
caagcaauucuccugccucagc

SEQ ID NO: 1381196 - RNA, 27 nt, Human
caagcaauucuccugccucagccgccc

SEQ ID NO: 1381197 - RNA, 19 nt, Human
caagugauccaccccccuc

SEQ ID NO: 1381198 - RNA, 21 nt, Human
caauggaaaaaguagacugga

SEQ ID NO: 1381199 - RNA, 22 nt, Human
cacaacauggacuuugaaaaaa

SEQ ID NO: 1381200 - RNA, 19 nt, Human
cacacucagcacagcagca

SEQ ID NO: 1381201 - RNA, 20 nt, Human
cacacucagcacagcagcaa

SEQ ID NO: 1381202 - RNA, 23 nt, Human
cacagagacaacaaaacaugcag

SEQ ID NO: 1381203 - RNA, 21 nt, Human
cacagcagcaacaaaacacaa

SEQ ID NO: 1381204 - RNA, 18 nt, Human
cacagugcccucuucccg

SEQ ID NO: 1381205 - RNA, 24 nt, Human
caccauccccagcuaauuuuugua

SEQ ID NO: 1381206 - RNA, 21 nt, Human
caccaugcuggccaggcuggu

SEQ ID NO: 1381207 - RNA, 23 nt, Human
caccaugcuggccaggcuggucu

SEQ ID NO: 1381208 - RNA, 27 nt, Human
caccaugcuggccaggcuggucuugaa

SEQ ID NO: 1381209 - RNA, 19 nt, Human
cacccaaaaaugccugcug

SEQ ID NO: 1381210 - RNA, 18 nt, Human
caccccccucagccuccc

SEQ ID NO: 1381211 - RNA, 21 nt, Human
caccccccucagccucccaaa

SEQ ID NO: 1381212 - RNA, 18 nt, Human
cacuguacaacacagaga

SEQ ID NO: 1381213 - RNA, 23 nt, Human
cacuguacaacacagagacaaca

SEQ ID NO: 1381214 - RNA, 24 nt, Human
cacuguacaacacagagacaacaa

SEQ ID NO: 1381215 - RNA, 24 nt, Human
cagcaacaaaacacaaccacaucu

SEQ ID NO: 1381216 - RNA, 20 nt, Human
cagcaaggagaaaagucccc

SEQ ID NO: 1381217 - RNA, 23 nt, Human
cagcagcaacaaaacacaaccac

SEQ ID NO: 1381218 - RNA, 24 nt, Human
cagcagcaacaaaacacaaccaca

SEQ ID NO: 1381219 - RNA, 19 nt, Human
cagcuacuccacagacaga

SEQ ID NO: 1381220 - RNA, 22 nt, Human
caggugaucugccugccucggc

SEQ ID NO: 1381221 - RNA, 24 nt, Human
caugcuggccaggcuggucuugaa

SEQ ID NO: 1381222 - RNA, 21 nt, Human
ccaaagugcugggauuacagg

SEQ ID NO: 1381223 - RNA, 21 nt, Human
ccaaagugcugggauuacagg

SEQ ID NO: 1381224 - RNA, 24 nt, Human
ccaaagugcugggauuacaggugu

SEQ ID NO: 1381225 - RNA, 24 nt, Human
ccaagaagcugggauuacagaugu

SEQ ID NO: 1381226 - RNA, 23 nt, Human
cccaaagucagucuacugacuac

SEQ ID NO: 1381227 - RNA, 20 nt, Human
cccaacacuuccccaaagca

SEQ ID NO: 1381228 - RNA, 19 nt, Human
cccaagaagcugggauuac

SEQ ID NO: 1381229 - RNA, 22 nt, Human
cccaagaagcugggauuacaga

SEQ ID NO: 1381230 - RNA, 24 nt, Human
cccaaguaggugagauuacaggca

SEQ ID NO: 1381231 - RNA, 21 nt, Human
cccaguguuucacaagcaaac

SEQ ID NO: 1381232 - RNA, 20 nt, Human
ccccaacacuuccccaaagc

SEQ ID NO: 1381233 - RNA, 24 nt, Human
ccccucagccucccaaagugcugg

SEQ ID NO: 1381234 - RNA, 21 nt, Human
cccgaauccaagaaaagaaag

SEQ ID NO: 1381235 - RNA, 21 nt, Human
cccguaagucccggccucauu

SEQ ID NO: 1381236 - RNA, 19 nt, Human
cccucacucaaaauggggu

SEQ ID NO: 1381237 - RNA, 22 nt, Human
ccgcagaaaacgaaugcaacaa

SEQ ID NO: 1381238 - RNA, 24 nt, Human
ccgcccaaguaggugagauuacag

SEQ ID NO: 1381239 - RNA, 21 nt, Human
ccgcggugcaaaauaaaagca

SEQ ID NO: 1381240 - RNA, 24 nt, Human
ccucauggguucaagcaauucucc

SEQ ID NO: 1381241 - RNA, 23 nt, Human
ccugaccucaagugauccacccc

SEQ ID NO: 1381242 - RNA, 24 nt, Human
ccugaccucaagugauccaccccc

SEQ ID NO: 1381243 - RNA, 21 nt, Human
ccugauuucaggugaucugcc

SEQ ID NO: 1381244 - RNA, 18 nt, Human
cgagccaauaccucaucu

SEQ ID NO: 1381245 - RNA, 24 nt, Human
cgcucugucacccaggcuggagug

SEQ ID NO: 1381246 - RNA, 20 nt, Human
cuaauuuuuguauuuuuaga

SEQ ID NO: 1381247 - RNA, 24 nt, Human
cucgcucugucacccaggcuggag

SEQ ID NO: 1381248 - RNA, 24 nt, Human
cugacagucauacuacauaugacu

SEQ ID NO: 1381249 - RNA, 23 nt, Human
cugccucggccucccaaagugcu

SEQ ID NO: 1381250 - RNA, 18 nt, Human
cuuccccaaagcacuaua

SEQ ID NO: 1381251 - RNA, 21 nt, Human
gaaugcaggcccguaaguccc

SEQ ID NO: 1381252 - RNA, 24 nt, Human
gaccucaagugauccaccccccuc

SEQ ID NO: 1381253 - RNA, 18 nt, Human
gauuacagaugucugcca

SEQ ID NO: 1381254 - RNA, 18 nt, Human
gauuacaggugugagcca

SEQ ID NO: 1381255 - RNA, 22 nt, Human
gauuacaggugugagccaccgc

SEQ ID NO: 1381256 - RNA, 23 nt, Human
gauuacaggugugagccaccgca

SEQ ID NO: 1381257 - RNA, 21 nt, Human
gcaaaaccaaacaaaacagca

SEQ ID NO: 1381258 - RNA, 22 nt, Human
gcaacuuccaccucauggguuc

SEQ ID NO: 1381259 - RNA, 23 nt, Human
gcacuauagucccaucuguggug

SEQ ID NO: 1381260 - RNA, 21 nt, Human
gcuccacccaaaaaugccugc

SEQ ID NO: 1381261 - RNA, 27 nt, Human
gcucugucacccaggcuggagugcaau

SEQ ID NO: 1381262 - RNA, 24 nt, Human
gcuggagugcaauagcgugaucug

SEQ ID NO: 1381263 - RNA, 23 nt, Human
gcuggucuugaacuccugaccuc

SEQ ID NO: 1381264 - RNA, 19 nt, Human
ggaacauguacucucacag

SEQ ID NO: 1381265 - RNA, 19 nt, Human
ggacagaaaucgggaggga

SEQ ID NO: 1381266 - RNA, 23 nt, Human
ggagaaaaguccccugauuucca

SEQ ID NO: 1381267 - RNA, 20 nt, Human
ggcuaaguucuuugugggaa

SEQ ID NO: 1381268 - RNA, 24 nt, Human
ggcuggucuugaacuccugaccuc

SEQ ID NO: 1381269 - RNA, 27 nt, Human
gggaacauguacucucacagugcccuc

SEQ ID NO: 1381270 - RNA, 23 nt, Human
gggguuucaacacguuggccagg

SEQ ID NO: 1381271 - RNA, 18 nt, Human
gggguuucaccaugcugg

SEQ ID NO: 1381272 - RNA, 22 nt, Human
gggguuucaccaugcuggccag

SEQ ID NO: 1381273 - RNA, 23 nt, Human
gggguuucaccaugcuggccagg

SEQ ID NO: 1381274 - RNA, 21 nt, Human
ggguaaggagaagggacgaag

SEQ ID NO: 1381275 - RNA, 20 nt, Human
ggguucaagcaauucuccug

SEQ ID NO: 1381276 - RNA, 22 nt, Human
ggguuucaacacguuggccagg

SEQ ID NO: 1381277 - RNA, 19 nt, Human
ggucuugaacuccugaccu

SEQ ID NO: 1381278 - RNA, 22 nt, Human
gugaaagaacagcuacuccaca

SEQ ID NO: 1381279 - RNA, 24 nt, Human
gugauccaccccccucagccuccc

SEQ ID NO: 1381280 - RNA, 18 nt, Human
guggguacagagugggac

SEQ ID NO: 1381281 - RNA, 20 nt, Human
gugugcaaaaccaaacaaaa

SEQ ID NO: 1381282 - RNA, 25 nt, Human
uaaaagcaaguuuauuaagaaagua

SEQ ID NO: 1381283 - RNA, 18 nt, Human
uaaaaucccuaagaccag

SEQ ID NO: 1381284 - RNA, 19 nt, Human
uaacagcagugaggauugg

SEQ ID NO: 1381285 - RNA, 21 nt, Human
uaacagcagugaggauuggaa

SEQ ID NO: 1381286 - RNA, 18 nt, Human
uaacccgaggucggucaa

SEQ ID NO: 1381287 - RNA, 21 nt, Human
uaacucagggcaaguccgcgg

SEQ ID NO: 1381288 - RNA, 22 nt, Human
uaagaggggccucuaacccacu

SEQ ID NO: 1381289 - RNA, 19 nt, Human
uaaggagaagggacgaagg

SEQ ID NO: 1381290 - RNA, 24 nt, Human
uaaggcaaaauaaaugaagaggau

SEQ ID NO: 1381291 - RNA, 24 nt, Human
uaauguuuguauuuuuaguagaga

SEQ ID NO: 1381292 - RNA, 24 nt, Human
uaauuuuuguauuuuuaguagaga

SEQ ID NO: 1381293 - RNA, 21 nt, Human
uacaacacagagacaacaaaa

SEQ ID NO: 1381294 - RNA, 24 nt, Human
uacaacacagagacaacaaaacau

SEQ ID NO: 1381295 - RNA, 23 nt, Human
uacagagugggacuagcugggua

SEQ ID NO: 1381296 - RNA, 23 nt, Human
uacaggcacuugucaccaucccc

SEQ ID NO: 1381297 - RNA, 21 nt, Human
uacaggugugagccaccgcac

SEQ ID NO: 1381298 - RNA, 21 nt, Human
uacaggugugagccaccgcac

SEQ ID NO: 1381299 - RNA, 23 nt, Human
uacaggugugagccaccgcacuu

SEQ ID NO: 1381300 - RNA, 24 nt, Human
uaguagagaagggguuucaccaug

SEQ ID NO: 1381301 - RNA, 19 nt, Human
uaguagagacgggguuuca

SEQ ID NO: 1381302 - RNA, 24 nt, Human
uaguagagacgggguuucaacacg

SEQ ID NO: 1381303 - RNA, 23 nt, Human
uagugugcaaaaccaaacaaaac

SEQ ID NO: 1381304 - RNA, 22 nt, Human
ucaaaccuguuuuuuagccgag

SEQ ID NO: 1381305 - RNA, 19 nt, Human
ucaagcaauucuccugccu

SEQ ID NO: 1381306 - RNA, 18 nt, Human
ucacccaggcuggagugc

SEQ ID NO: 1381307 - RNA, 18 nt, Human
ucacugcaacuuccaccu

SEQ ID NO: 1381308 - RNA, 23 nt, Human
ucacugcaacuuccaccucaugg

SEQ ID NO: 1381309 - RNA, 24 nt, Human
ucacugcaacuuccaccucauggg

SEQ ID NO: 1381310 - RNA, 18 nt, Human
ucagccucccaaagugcu

SEQ ID NO: 1381311 - RNA, 20 nt, Human
ucaggugaucugccugccuc

SEQ ID NO: 1381312 - RNA, 26 nt, Human
ucagguggacuacagggagaaagaaa

SEQ ID NO: 1381313 - RNA, 24 nt, Human
ucauggguucaagcaauucuccug

SEQ ID NO: 1381314 - RNA, 23 nt, Human
ucccaaagugcugggauuacagg

SEQ ID NO: 1381315 - RNA, 21 nt, Human
uccgcggugcaaaauaaaagc

SEQ ID NO: 1381316 - RNA, 19 nt, Human
uccgcuccacccaaaaaug

SEQ ID NO: 1381317 - RNA, 21 nt, Human
uccuagauuaaagcgauucuc

SEQ ID NO: 1381318 - RNA, 24 nt, Human
uccuagauuaaagcgauucuccug

SEQ ID NO: 1381319 - RNA, 18 nt, Human
uccuccacuguacaacac

SEQ ID NO: 1381320 - RNA, 24 nt, Human
ucgcucugucacccaggcuggagu

SEQ ID NO: 1381321 - RNA, 18 nt, Human
ucggccucccaaagugcu

SEQ ID NO: 1381322 - RNA, 18 nt, Human
ucggucaaguguccuugc

SEQ ID NO: 1381323 - RNA, 24 nt, Human
ucuauauauagggucaaaccagac

SEQ ID NO: 1381324 - RNA, 28 nt, Human
ucucaaacucaucuacaaauuuuccugg

SEQ ID NO: 1381325 - RNA, 20 nt, Human
ucuccugaaaaugacacuga

SEQ ID NO: 1381326 - RNA, 23 nt, Human
ucucgaacuccugauuucaggug

SEQ ID NO: 1381327 - RNA, 19 nt, Human
ucucgcucugucacccagg

SEQ ID NO: 1381328 - RNA, 22 nt, Human
ucucgcucugucacccaggcug

SEQ ID NO: 1381329 - RNA, 23 nt, Human
ucucgcucugucacccaggcugg

SEQ ID NO: 1381330 - RNA, 24 nt, Human
ucucgcucugucacccaggcugga

SEQ ID NO: 1381331 - RNA, 26 nt, Human
ucucgcucugucacccaggcuggagu

SEQ ID NO: 1381332 - RNA, 27 nt, Human
ucucgcucugucacccaggcuggagug

SEQ ID NO: 1381333 - RNA, 24 nt, Human
ucugucacccaggcuggagugcaa

SEQ ID NO: 1381334 - RNA, 18 nt, Human
ucuguugagaagacugcu

SEQ ID NO: 1381335 - RNA, 21 nt, Human
ucuugaacuccugaccucaag

SEQ ID NO: 1381336 - RNA, 20 nt, Human
ugaaagaacagcuacuccac

SEQ ID NO: 1381337 - RNA, 23 nt, Human
ugaaagaacagcuacuccacaga

SEQ ID NO: 1381338 - RNA, 26 nt, Human
ugacacugaaacggagacagcaacca

SEQ ID NO: 1381339 - RNA, 22 nt, Human
ugaccucaagugauccaccccc

SEQ ID NO: 1381340 - RNA, 23 nt, Human
ugacucagcaucccaagaagcug

SEQ ID NO: 1381341 - RNA, 20 nt, Human
ugacucagccacgucaaugg

SEQ ID NO: 1381342 - RNA, 22 nt, Human
ugagacagagucucgcucuguu

SEQ ID NO: 1381343 - RNA, 22 nt, Human
ugagauuacaggcacuugucac

SEQ ID NO: 1381344 - RNA, 24 nt, Human
ugagauuacaggcacuugucacca

SEQ ID NO: 1381345 - RNA, 25 nt, Human
ugagauuacaggcacuugucaccau

SEQ ID NO: 1381346 - RNA, 24 nt, Human
ugauuucaggugaucugccugccu

SEQ ID NO: 1381347 - RNA, 23 nt, Human
ugauuuccauccuagugcuucuc

SEQ ID NO: 1381348 - RNA, 19 nt, Human
ugcaaaaccaaacaaaaca

SEQ ID NO: 1381349 - RNA, 25 nt, Human
ugcaacuuccaccucauggguucaa

SEQ ID NO: 1381350 - RNA, 20 nt, Human
ugccucagccgcccaaguag

SEQ ID NO: 1381351 - RNA, 21 nt, Human
ugccucggccucccaaagugc

SEQ ID NO: 1381352 - RNA, 24 nt, Human
ugccucggccucccaaagugcugg

SEQ ID NO: 1381353 - RNA, 18 nt, Human
ugcuggccaggcuggucu

SEQ ID NO: 1381354 - RNA, 24 nt, Human
ugcugggauuacaggugugagcca

SEQ ID NO: 1381355 - RNA, 24 nt, Human
ugcuuuugguucccaguguuucac

SEQ ID NO: 1381356 - RNA, 18 nt, Human
uggagugcaguggugcaa

SEQ ID NO: 1381357 - RNA, 23 nt, Human
uggagugcaguggugcaaucuca

SEQ ID NO: 1381358 - RNA, 24 nt, Human
uggagugcaguggugcaaucucag

SEQ ID NO: 1381359 - RNA, 24 nt, Human
uggccaggauggucucgaacuccu

SEQ ID NO: 1381360 - RNA, 24 nt, Human
uggccaggcuggucuugaacuccu

SEQ ID NO: 1381361 - RNA, 19 nt, Human
ugggauuacagaugucugc

SEQ ID NO: 1381362 - RNA, 21 nt, Human
ugggauuacagaugucugcca

SEQ ID NO: 1381363 - RNA, 22 nt, Human
ugggauuacagaugucugccac

SEQ ID NO: 1381364 - RNA, 24 nt, Human
ugggauuacagaugucugccacua

SEQ ID NO: 1381365 - RNA, 18 nt, Human
ugggauuacaggugugag

SEQ ID NO: 1381366 - RNA, 19 nt, Human
ugggauuacaggugugagc

SEQ ID NO: 1381367 - RNA, 21 nt, Human
ugggauuacaggugugagcca

SEQ ID NO: 1381368 - RNA, 22 nt, Human
ugggauuacaggugugagccac

SEQ ID NO: 1381369 - RNA, 23 nt, Human
ugggauuacaggugugagccacc

SEQ ID NO: 1381370 - RNA, 24 nt, Human
ugggauuacaggugugagccaccg

SEQ ID NO: 1381371 - RNA, 21 nt, Human
ugggccucuaacccaaucccu

SEQ ID NO: 1381372 - RNA, 21 nt, Human
uggguucaagcaauucuccug

SEQ ID NO: 1381373 - RNA, 23 nt, Human
uggguucaagcaauucuccugcc

SEQ ID NO: 1381374 - RNA, 24 nt, Human
uggguucaagcaauucuccugccu

SEQ ID NO: 1381375 - RNA, 24 nt, Human
uggugcaaucucagcuaacugcaa

SEQ ID NO: 1381376 - RNA, 24 nt, Human
uguacaacacagagacaacaaaac

SEQ ID NO: 1381377 - RNA, 21 nt, Human
uguauuuuuaguagagacggg

SEQ ID NO: 1381378 - RNA, 20 nt, Human
ugucacccaggcuggagugc

SEQ ID NO: 1381379 - RNA, 21 nt, Human
ugugcaaaaccaaacaaaaca

SEQ ID NO: 1381380 - RNA, 24 nt, Human
uguugagaagacugcuggagugca

SEQ ID NO: 1381381 - RNA, 21 nt, Human
uguuuguauuuuuaguagaga

SEQ ID NO: 1381382 - RNA, 23 nt, Human
uuaaccguaaguaucugaaagcu

SEQ ID NO: 1381383 - RNA, 18 nt, Human
uuaguagagaagggguuu

SEQ ID NO: 1381384 - RNA, 22 nt, Human
uuaguagagaagggguuucacc

SEQ ID NO: 1381385 - RNA, 24 nt, Human
uuaguagagaagggguuucaccau

SEQ ID NO: 1381386 - RNA, 18 nt, Human
uuaguagagacgggguuu

SEQ ID NO: 1381387 - RNA, 22 nt, Human
uuaguagagacgggguuucaac

SEQ ID NO: 1381388 - RNA, 21 nt, Human
uucaagcaauucuccugccuc

SEQ ID NO: 1381389 - RNA, 26 nt, Human
uucaagcaauucuccugccucagccg

SEQ ID NO: 1381390 - RNA, 21 nt, Human
uucuccagauauccagcuauc

SEQ ID NO: 1381391 - RNA, 23 nt, Human
uuguauuuuuaguagagacgggg

SEQ ID NO: 1381392 - RNA, 21 nt, Human
uuucaccaugcuggccaggcu

SEQ ID NO: 1381393 - RNA, 19 nt, Human
uuuggguugggggaguuuc

SEQ ID NO: 1381394 - RNA, 18 nt, Human
uuuguauuuuuaguagag

SEQ ID NO: 1381395 - RNA, 24 nt, Human
uuuuuaguagagaagggguuucac

SEQ ID NO: 1381396 - RNA, 22 nt, Human
uuuuuaguagagacgggguuuc

SEQ ID NO: 1381397 - RNA, 20 nt, Human
uuuuuguauuuuuaguagag

SEQ ID NO: 1381398 - RNA, 22 nt, Human
aacauaucucccuccacuccua

SEQ ID NO: 1381399 - RNA, 22 nt, Human
aagcaacaggaguaaggcacag

SEQ ID NO: 1381400 - RNA, 24 nt, Human
acagagcagcgcucucgacugggg

SEQ ID NO: 1381401 - RNA, 21 nt, Human
acagcagaauucccaccagcu

SEQ ID NO: 1381402 - RNA, 21 nt, Human
acccugcuugcuggagaggga

SEQ ID NO: 1381403 - RNA, 23 nt, Human
acucccuucccuucuggagcugg

SEQ ID NO: 1381404 - RNA, 21 nt, Human
agcaacaggaguaaggcacag

SEQ ID NO: 1381405 - RNA, 21 nt, Human
agcagcuaaacugcaacaaaa

SEQ ID NO: 1381406 - RNA, 25 nt, Human
agccaccaaaagucuauagcaagcu

SEQ ID NO: 1381407 - RNA, 19 nt, Human
agccauugguguagaugac

SEQ ID NO: 1381408 - RNA, 22 nt, Human
agcuaaacugcaacaaaaccca

SEQ ID NO: 1381409 - RNA, 23 nt, Human
aggaaaucccuccacagcagcua

SEQ ID NO: 1381410 - RNA, 19 nt, Human
agggaccaggguuccaaac

SEQ ID NO: 1381411 - RNA, 20 nt, Human
agggaccaggguuccaaacu

SEQ ID NO: 1381412 - RNA, 21 nt, Human
aguaagggagguggggaagaa

SEQ ID NO: 1381413 - RNA, 21 nt, Human
caacaggaguaaggcacagag

SEQ ID NO: 1381414 - RNA, 18 nt, Human
cacagagcagcgcucucg

SEQ ID NO: 1381415 - RNA, 22 nt, Human
cacagccaggucucacuggcac

SEQ ID NO: 1381416 - RNA, 24 nt, Human
caccaaaagucuauagcaagcuuc

SEQ ID NO: 1381417 - RNA, 21 nt, Human
cacugccaaguuaaagaaaac

SEQ ID NO: 1381418 - RNA, 20 nt, Human
cagagccaccaaaagucuau

SEQ ID NO: 1381419 - RNA, 19 nt, Human
cagcgcucucgacuggggu

SEQ ID NO: 1381420 - RNA, 20 nt, Human
caggaguaggcaagcaacag

SEQ ID NO: 1381421 - RNA, 22 nt, Human
caggcaaauggaagugaucaaa

SEQ ID NO: 1381422 - RNA, 26 nt, Human
ccaaguggaguccaggcagggcugcc

SEQ ID NO: 1381423 - RNA, 21 nt, Human
ccacaccaccaaguaagaaua

SEQ ID NO: 1381424 - RNA, 18 nt, Human
cccaguugccuucgccug

SEQ ID NO: 1381425 - RNA, 20 nt, Human
ccccagccgacccccaggcu

SEQ ID NO: 1381426 - RNA, 18 nt, Human
cccccaggcucucuccuc

SEQ ID NO: 1381427 - RNA, 20 nt, Human
cccccaggcucucuccucac

SEQ ID NO: 1381428 - RNA, 21 nt, Human
cccccaggcucucuccucacu

SEQ ID NO: 1381429 - RNA, 20 nt, Human
cgacccccaggcucucuccu

SEQ ID NO: 1381430 - RNA, 20 nt, Human
cugcaacaaaacccaccaga

SEQ ID NO: 1381431 - RNA, 22 nt, Human
cugccauguuuccauggaaaug

SEQ ID NO: 1381432 - RNA, 20 nt, Human
cugguuguagagcuguagcu

SEQ ID NO: 1381433 - RNA, 19 nt, Human
cuuguaggaaaucccucca

SEQ ID NO: 1381434 - RNA, 19 nt, Human
cuuugaucugauucacuag

SEQ ID NO: 1381435 - RNA, 20 nt, Human
gaaaucccuccacagcagcu

SEQ ID NO: 1381436 - RNA, 26 nt, Human
gaaugggguggggguguuaccacuuc

SEQ ID NO: 1381437 - RNA, 21 nt, Human
gaccaggguuccaaacuuuuu

SEQ ID NO: 1381438 - RNA, 20 nt, Human
gacccccaggcucucuccuc

SEQ ID NO: 1381439 - RNA, 26 nt, Human
gcaagcaacaggaguaaggcacagag

SEQ ID NO: 1381440 - RNA, 22 nt, Human
gccuuaaacuuugagcuccagc

SEQ ID NO: 1381441 - RNA, 18 nt, Human
gcugggggauggccaggc

SEQ ID NO: 1381442 - RNA, 20 nt, Human
ggaagaauuuggcugcuguu

SEQ ID NO: 1381443 - RNA, 20 nt, Human
ggaguccaggcagggcugcc

SEQ ID NO: 1381444 - RNA, 19 nt, Human
ggggaauggggugggggug

SEQ ID NO: 1381445 - RNA, 22 nt, Human
guccuuguaggaaaucccucca

SEQ ID NO: 1381446 - RNA, 24 nt, Human
uaacuuaccacugugcuuguuggu

SEQ ID NO: 1381447 - RNA, 19 nt, Human
uaagaauagguugcugugu

SEQ ID NO: 1381448 - RNA, 21 nt, Human
uagcaagcuucuacugggaac

SEQ ID NO: 1381449 - RNA, 20 nt, Human
ucacugccugcuccacuccc

SEQ ID NO: 1381450 - RNA, 24 nt, Human
uccacagcagcuaaacugcaacaa

SEQ ID NO: 1381451 - RNA, 26 nt, Human
ucgccugaagauauucucacuucuua

SEQ ID NO: 1381452 - RNA, 20 nt, Human
ugaucacugccuggucagga

SEQ ID NO: 1381453 - RNA, 22 nt, Human
ugcaggcaaauggaagugauca

SEQ ID NO: 1381454 - RNA, 21 nt, Human
ugcaggggaauggggugggga

SEQ ID NO: 1381455 - RNA, 20 nt, Human
ugccuggucaggaguaggca

SEQ ID NO: 1381456 - RNA, 18 nt, Human
ugcuccacucccuucccu

SEQ ID NO: 1381457 - RNA, 23 nt, Human
ugcuccacucccuucccuucugg

SEQ ID NO: 1381458 - RNA, 18 nt, Human
ugcuggagagggagggcc

SEQ ID NO: 1381459 - RNA, 19 nt, Human
ugcuggagagggagggcca

SEQ ID NO: 1381460 - RNA, 23 nt, Human
ugcuguguauccaguugaccaac

SEQ ID NO: 1381461 - RNA, 20 nt, Human
ugcuugcuggagagggaggg

SEQ ID NO: 1381462 - RNA, 18 nt, Human
uggcucagucccacuucu

SEQ ID NO: 1381463 - RNA, 26 nt, Human
uggcuuugcaggcaaaugggggaacc

SEQ ID NO: 1381464 - RNA, 18 nt, Human
ugggaggauggcaggaca

SEQ ID NO: 1381465 - RNA, 19 nt, Human
uggggaagaauuuggcugc

SEQ ID NO: 1381466 - RNA, 18 nt, Human
uguauggcucagucccac

SEQ ID NO: 1381467 - RNA, 21 nt, Human
uuacaguuguacauauauuuu

SEQ ID NO: 1381468 - RNA, 21 nt, Human
uucacuaggaucugggacagc

SEQ ID NO: 1381469 - RNA, 22 nt, Human
uuccaaguagucaaaggccugc

SEQ ID NO: 1381470 - RNA, 25 nt, Human
uucgaaguaagggagguggggaaga

SEQ ID NO: 1381471 - RNA, 19 nt, Human
uucuugagagaaguuucug

SEQ ID NO: 1381472 - RNA, 21 nt, Human
uuucgaaguaagggagguggg

SEQ ID NO: 1381473 - RNA, 19 nt, Human
aaaccagaguccaggcaac

SEQ ID NO: 1381474 - RNA, 25 nt, Human
aaaccagaguccaggcaacgaagca

SEQ ID NO: 1381475 - RNA, 21 nt, Human
aagccccgcccccagcagucc

SEQ ID NO: 1381476 - RNA, 20 nt, Human
accaagccccgcccccagca

SEQ ID NO: 1381477 - RNA, 22 nt, Human
accaccaagccccgcccccagc

SEQ ID NO: 1381478 - RNA, 20 nt, Human
agaccggccuccagccggua

SEQ ID NO: 1381479 - RNA, 20 nt, Human
aggcagagggaggaccaacu

SEQ ID NO: 1381480 - RNA, 19 nt, Human
aggccccggcuugcuccag

SEQ ID NO: 1381481 - RNA, 26 nt, Human
caaagcccaccccucugagccccagg

SEQ ID NO: 1381482 - RNA, 22 nt, Human
caacgaagcagcgucgacccuc

SEQ ID NO: 1381483 - RNA, 22 nt, Human
cacaguguugcaagaacccgcu

SEQ ID NO: 1381484 - RNA, 21 nt, Human
caccaccaagccccgccccca

SEQ ID NO: 1381485 - RNA, 23 nt, Human
cagcagucaccaccaagccccgc

SEQ ID NO: 1381486 - RNA, 23 nt, Human
cagcagucccccgcuccugcaag

SEQ ID NO: 1381487 - RNA, 18 nt, Human
ccagcagucccccgcucc

SEQ ID NO: 1381488 - RNA, 20 nt, Human
cccaccccucugagccccag

SEQ ID NO: 1381489 - RNA, 18 nt, Human
ccccagcagucccccgcu

SEQ ID NO: 1381490 - RNA, 19 nt, Human
ccccgccagcagucaccac

SEQ ID NO: 1381491 - RNA, 19 nt, Human
ccccgcccccagcaguccc

SEQ ID NO: 1381492 - RNA, 22 nt, Human
ccucugagccccaggccccgcc

SEQ ID NO: 1381493 - RNA, 20 nt, Human
ccugcaagaccggccuccag

SEQ ID NO: 1381494 - RNA, 18 nt, Human
ccuuugcucuuugggggc

SEQ ID NO: 1381495 - RNA, 18 nt, Human
ccuuugcucuuugggggc

SEQ ID NO: 1381496 - RNA, 19 nt, Human
cgccagcagucaccaccaa

SEQ ID NO: 1381497 - RNA, 22 nt, Human
cgccagcagucaccaccaagcc

SEQ ID NO: 1381498 - RNA, 21 nt, Human
cggaagcagauuuagggaggg

SEQ ID NO: 1381499 - RNA, 19 nt, Human
cucacaguguugcaagaac

SEQ ID NO: 1381500 - RNA, 18 nt, Human
cuccaaagcccaccccuc

SEQ ID NO: 1381501 - RNA, 20 nt, Human
cugagccccaggccccgccc

SEQ ID NO: 1381502 - RNA, 25 nt, Human
ggaaggggauggggcugccuccugg

SEQ ID NO: 1381503 - RNA, 21 nt, Human
ggagggccuacuuaggggcug

SEQ ID NO: 1381504 - RNA, 22 nt, Human
ggcccaucuuuggggcuaagac

SEQ ID NO: 1381505 - RNA, 20 nt, Human
ggggcuggaaggggaugggg

SEQ ID NO: 1381506 - RNA, 22 nt, Human
ggugcggaagcagauuuaggga

SEQ ID NO: 1381507 - RNA, 19 nt, Human
guugccuuugcucuuuggg

SEQ ID NO: 1381508 - RNA, 24 nt, Human
ucaccaccaagccccgcccccagc

SEQ ID NO: 1381509 - RNA, 25 nt, Human
uccaaagcccaccccucugagcccc

SEQ ID NO: 1381510 - RNA, 19 nt, Human
ucugggagagagaaggccc

SEQ ID NO: 1381511 - RNA, 22 nt, Human
ucuugcuguugccuuugcucuu

SEQ ID NO: 1381512 - RNA, 20 nt, Human
ugagaggaaaggcagaggga

SEQ ID NO: 1381513 - RNA, 25 nt, Human
ugagaggaaaggcagagggaggacc

SEQ ID NO: 1381514 - RNA, 20 nt, Human
ugagccccaggccccgcccc

SEQ ID NO: 1381515 - RNA, 22 nt, Human
ugagccccaggccccgccccgc

SEQ ID NO: 1381516 - RNA, 21 nt, Human
ugaucuccaaagcccaccccu

SEQ ID NO: 1381517 - RNA, 22 nt, Human
ugccuuugcucuuugggggcuu

SEQ ID NO: 1381518 - RNA, 23 nt, Human
uggggcugccuccuggagugugg

SEQ ID NO: 1381519 - RNA, 19 nt, Human
uugccuuugcucuuugggg

SEQ ID NO: 1381520 - RNA, 21 nt, Human
aaaaaaaaaaaacaccuagaa

SEQ ID NO: 1381521 - RNA, 24 nt, Human
aaaaggaacaaaaauagaaaacaa

SEQ ID NO: 1381522 - RNA, 21 nt, Human
aaacuacuucuaucuuaaaua

SEQ ID NO: 1381523 - RNA, 24 nt, Human
aaauagaaaacaaguucuagagaa

SEQ ID NO: 1381524 - RNA, 21 nt, Human
aaauggcaguaaaggcuguug

SEQ ID NO: 1381525 - RNA, 22 nt, Human
aacucaauauuuguaucucaca

SEQ ID NO: 1381526 - RNA, 24 nt, Human
aagguaaguuuucuuauugguaug

SEQ ID NO: 1381527 - RNA, 26 nt, Human
aauaauaaauacaaguuaguagcucc

SEQ ID NO: 1381528 - RNA, 20 nt, Human
aaucucagcuucagugaaau

SEQ ID NO: 1381529 - RNA, 24 nt, Human
acaguggaaaaacauacagcugga

SEQ ID NO: 1381530 - RNA, 19 nt, Human
accuccaaaaccucuacca

SEQ ID NO: 1381531 - RNA, 24 nt, Human
acugcaauuaaaagucuuccaauu

SEQ ID NO: 1381532 - RNA, 19 nt, Human
agaacaugaauuuauaagu

SEQ ID NO: 1381533 - RNA, 19 nt, Human
agaaucucuaacaaugaag

SEQ ID NO: 1381534 - RNA, 23 nt, Human
aguggaaaaacauacagcuggaa

SEQ ID NO: 1381535 - RNA, 19 nt, Human
auacauuauuuacaucuuu

SEQ ID NO: 1381536 - RNA, 19 nt, Human
augcacuaaucuuuuuuac

SEQ ID NO: 1381537 - RNA, 21 nt, Human
caaagcauccuuaaaaugaaa

SEQ ID NO: 1381538 - RNA, 22 nt, Human
caaugaugcuaccaaugcuuaa

SEQ ID NO: 1381539 - RNA, 25 nt, Human
caccuuaaaaagaaaguucuacaac

SEQ ID NO: 1381540 - RNA, 24 nt, Human
cacuaaucuuuuuuacaaccugca

SEQ ID NO: 1381541 - RNA, 19 nt, Human
caggaaacuauucuuuuau

SEQ ID NO: 1381542 - RNA, 18 nt, Human
caguaguuaaaauuaaau

SEQ ID NO: 1381543 - RNA, 21 nt, Human
cauaagcaaggaaaaugcuaa

SEQ ID NO: 1381544 - RNA, 21 nt, Human
caucacauacaagucuguaua

SEQ ID NO: 1381545 - RNA, 22 nt, Human
caucucuauuuccugauaagag

SEQ ID NO: 1381546 - RNA, 19 nt, Human
cauggcacauuccuuugaa

SEQ ID NO: 1381547 - RNA, 19 nt, Human
ccacaucaucucuauuucc

SEQ ID NO: 1381548 - RNA, 21 nt, Human
cccaaaagaaccacucugaag

SEQ ID NO: 1381549 - RNA, 27 nt, Human
cccaaaagaaccacucugaagaugaag

SEQ ID NO: 1381550 - RNA, 20 nt, Human
cccuucuaguuacuugauua

SEQ ID NO: 1381551 - RNA, 22 nt, Human
ccugauaagagacuguaguguu

SEQ ID NO: 1381552 - RNA, 20 nt, Human
cuacaagugacagacauaca

SEQ ID NO: 1381553 - RNA, 19 nt, Human
cuagaacaguuccaaaaac

SEQ ID NO: 1381554 - RNA, 20 nt, Human
cuauccuacaguaguuaaaa

SEQ ID NO: 1381555 - RNA, 19 nt, Human
cuccaaaaccucuaccagc

SEQ ID NO: 1381556 - RNA, 24 nt, Human
cugaaaccuaugaauugacaguaa

SEQ ID NO: 1381557 - RNA, 22 nt, Human
cuggaauaaacagugcucccaa

SEQ ID NO: 1381558 - RNA, 28 nt, Human
gaaaaugcacuaaucuuuuuuacaaccu

SEQ ID NO: 1381559 - RNA, 27 nt, Human
gaacaaaaauagaaaacaaguucuaga

SEQ ID NO: 1381560 - RNA, 18 nt, Human
gaacaguuccaaaaacaa

SEQ ID NO: 1381561 - RNA, 22 nt, Human
gaagaccugcaaaaucagccua

SEQ ID NO: 1381562 - RNA, 24 nt, Human
gcuccaaaaaaacuacuuucccua

SEQ ID NO: 1381563 - RNA, 19 nt, Human
gcucccaaaagaaccacuc

SEQ ID NO: 1381564 - RNA, 21 nt, Human
gcugaacaacagugauuucca

SEQ ID NO: 1381565 - RNA, 18 nt, Human
ggaacaaaaauagaaaac

SEQ ID NO: 1381566 - RNA, 18 nt, Human
gggaagguagaaagagac

SEQ ID NO: 1381567 - RNA, 21 nt, Human
gguaaauuaaccuccaaaacc

SEQ ID NO: 1381568 - RNA, 23 nt, Human
gugcucccaaaagaaccacucug

SEQ ID NO: 1381569 - RNA, 19 nt, Human
gugguuaucaaaaccuguc

SEQ ID NO: 1381570 - RNA, 24 nt, Human
guucaucugagugaaaacauuuaa

SEQ ID NO: 1381571 - RNA, 24 nt, Human
uaaaaaguaaaaccuccacaucca

SEQ ID NO: 1381572 - RNA, 25 nt, Human
uaaaaagucauuucugucgaacaau

SEQ ID NO: 1381573 - RNA, 19 nt, Human
uaaauuacaguugagcuga

SEQ ID NO: 1381574 - RNA, 20 nt, Human
uaaauuucaaaauaagguaa

SEQ ID NO: 1381575 - RNA, 20 nt, Human
uaagguaaauuaaccuccaa

SEQ ID NO: 1381576 - RNA, 24 nt, Human
uaaguaaaaaacaauuuaauauua

SEQ ID NO: 1381577 - RNA, 21 nt, Human
uaccaaugcuuaaaacauucu

SEQ ID NO: 1381578 - RNA, 25 nt, Human
uagagaaaggacuugguuuuuuucc

SEQ ID NO: 1381579 - RNA, 23 nt, Human
uagcuggaauaaacagugcuccc

SEQ ID NO: 1381580 - RNA, 21 nt, Human
uauaaacauugaguuucuucu

SEQ ID NO: 1381581 - RNA, 23 nt, Human
uaugcagaaaaaguuauuacauu

SEQ ID NO: 1381582 - RNA, 19 nt, Human
uauguaauauauaaauauc

SEQ ID NO: 1381583 - RNA, 23 nt, Human
uauucaccuuaaaaagaaaguuc

SEQ ID NO: 1381584 - RNA, 19 nt, Human
ucaaaauagugacaucagg

SEQ ID NO: 1381585 - RNA, 18 nt, Human
ucaaauuaaacuuuucca

SEQ ID NO: 1381586 - RNA, 20 nt, Human
ucaaugaugcuaccaaugcu

SEQ ID NO: 1381587 - RNA, 26 nt, Human
uccaaaaccucuaccagcaacuaaca

SEQ ID NO: 1381588 - RNA, 21 nt, Human
uccacuuuuccauaguaucca

SEQ ID NO: 1381589 - RNA, 20 nt, Human
ucccuaaaaagucauuucug

SEQ ID NO: 1381590 - RNA, 22 nt, Human
ucucuaacaaugaagaccugca

SEQ ID NO: 1381591 - RNA, 26 nt, Human
ucuuuaaaaaaaaaaaaacaccuaga

SEQ ID NO: 1381592 - RNA, 19 nt, Human
ugaaaaggaacaaaaauag

SEQ ID NO: 1381593 - RNA, 22 nt, Human
ugaaaaggaacaaaaauagaaa

SEQ ID NO: 1381594 - RNA, 24 nt, Human
ugaaaaggaacaaaaauagaaaac

SEQ ID NO: 1381595 - RNA, 25 nt, Human
ugaagaccugcaaaaucagccuaau

SEQ ID NO: 1381596 - RNA, 23 nt, Human
ugaaucaguucagcuacaaguga

SEQ ID NO: 1381597 - RNA, 24 nt, Human
ugacaguaaauacuucagaaucuc

SEQ ID NO: 1381598 - RNA, 27 nt, Human
ugaguuucuucuuuaaaaaaaaaaaaa

SEQ ID NO: 1381599 - RNA, 21 nt, Human
ugcaguaaaaguuaaaccuau

SEQ ID NO: 1381600 - RNA, 22 nt, Human
uggaaaaacauacagcuggaaa

SEQ ID NO: 1381601 - RNA, 18 nt, Human
uggaauaaacagugcucc

SEQ ID NO: 1381602 - RNA, 24 nt, Human
uggaauaaacagugcucccaaaag

SEQ ID NO: 1381603 - RNA, 19 nt, Human
uggauuucauaacuuagau

SEQ ID NO: 1381604 - RNA, 18 nt, Human
ugucaaaaugugaaucag

SEQ ID NO: 1381605 - RNA, 26 nt, Human
uguguacacgcacaguggaaaaacau

SEQ ID NO: 1381606 - RNA, 24 nt, Human
uguuuuauccauccugauaagaca

SEQ ID NO: 1381607 - RNA, 25 nt, Human
uuaaaauaagcuuaaaguauaaauc

SEQ ID NO: 1381608 - RNA, 24 nt, Human
uuaaacaaaaaugaagcaauuaaa

SEQ ID NO: 1381609 - RNA, 20 nt, Human
uuaaacuuugaucaguaaca

SEQ ID NO: 1381610 - RNA, 22 nt, Human
uuaaacuuugaucaguaacaac

SEQ ID NO: 1381611 - RNA, 21 nt, Human
uuaguucuauaugcagaaaaa

SEQ ID NO: 1381612 - RNA, 18 nt, Human
uuauugguaugcagucac

SEQ ID NO: 1381613 - RNA, 20 nt, Human
uucaaaauggauuauucucc

SEQ ID NO: 1381614 - RNA, 24 nt, Human
uuccugauaagagacuguaguguu

SEQ ID NO: 1381615 - RNA, 21 nt, Human
uucuaguuacuugauuauaag

SEQ ID NO: 1381616 - RNA, 21 nt, Human
uuggucccacaucuuuuaaaa

SEQ ID NO: 1381617 - RNA, 26 nt, Human
uuuaaaaaaaaaaaaacaccuagaau

SEQ ID NO: 1381618 - RNA, 22 nt, Human
uuuaaauauuucccaucccauc

SEQ ID NO: 1381619 - RNA, 18 nt, Human
uuuacuaucuaccuuuga

SEQ ID NO: 1381620 - RNA, 18 nt, Human
uuuguacaaaaaucucca

SEQ ID NO: 1381621 - RNA, 20 nt, Human
uuuguacaaaaaucuccagu

SEQ ID NO: 1381622 - RNA, 22 nt, Human
uuuucucucuuuugucaaaaug

SEQ ID NO: 1381623 - RNA, 22 nt, Human
aaaaaaagguaauguccacaaa

SEQ ID NO: 1381624 - RNA, 22 nt, Human
aaaaaaccaacagccacauaau

SEQ ID NO: 1381625 - RNA, 26 nt, Human
aaaaaacuccaaaccagcauuuggcc

SEQ ID NO: 1381626 - RNA, 25 nt, Human
aaaaacacagacacaaccuuuuccu

SEQ ID NO: 1381627 - RNA, 25 nt, Human
aaaaacuccaaaccagcauuuggcc

SEQ ID NO: 1381628 - RNA, 21 nt, Human
aaaaagauuccaacauaccua

SEQ ID NO: 1381629 - RNA, 22 nt, Human
aaaaagcagaauaaagaaaaac

SEQ ID NO: 1381630 - RNA, 24 nt, Human
aaacaaaagaucuaaaauaaaaca

SEQ ID NO: 1381631 - RNA, 20 nt, Human
aaacacauaaagaaagaaac

SEQ ID NO: 1381632 - RNA, 22 nt, Human
aaagaaagaaacgugaagaagc

SEQ ID NO: 1381633 - RNA, 23 nt, Human
aaagaaagaaacgugaagaagcc

SEQ ID NO: 1381634 - RNA, 19 nt, Human
aagaaaaacuuaaaaacac

SEQ ID NO: 1381635 - RNA, 20 nt, Human
aagaaagaaacgugaagaag

SEQ ID NO: 1381636 - RNA, 21 nt, Human
aagaaagaaacgugaagaagc

SEQ ID NO: 1381637 - RNA, 21 nt, Human
aagaagguccaauuuaaaaac

SEQ ID NO: 1381638 - RNA, 20 nt, Human
aagaggagacaaauugugua

SEQ ID NO: 1381639 - RNA, 25 nt, Human
acaaaaaaagguaauguccacaaaa

SEQ ID NO: 1381640 - RNA, 21 nt, Human
acaauauaaagaagguccaau

SEQ ID NO: 1381641 - RNA, 24 nt, Human
acagacacaaccuuuuccuguuac

SEQ ID NO: 1381642 - RNA, 23 nt, Human
acccugacagacaacugaaacaa

SEQ ID NO: 1381643 - RNA, 18 nt, Human
acugccucuugagucaca

SEQ ID NO: 1381644 - RNA, 20 nt, Human
agaaagaaacgugaagaagc

SEQ ID NO: 1381645 - RNA, 26 nt, Human
agacagaagguugaauuggagggacc

SEQ ID NO: 1381646 - RNA, 22 nt, Human
agcaaaaaagcagaauaaagaa

SEQ ID NO: 1381647 - RNA, 24 nt, Human
agcaaaaaagcagaauaaagaaaa

SEQ ID NO: 1381648 - RNA, 19 nt, Human
agcagaaaacccacccaaa

SEQ ID NO: 1381649 - RNA, 21 nt, Human
agcagauuuuuuucuucuuuu

SEQ ID NO: 1381650 - RNA, 21 nt, Human
agccugauuaauuuacuaugg

SEQ ID NO: 1381651 - RNA, 19 nt, Human
aggcaaaaaaaagauucca

SEQ ID NO: 1381652 - RNA, 30 nt, Human
aggcaaaaaaaagauuccaacauaccuaag

SEQ ID NO: 1381653 - RNA, 25 nt, Human
aggcaucaacaauugggaauaaacc

SEQ ID NO: 1381654 - RNA, 21 nt, Human
aggcuauugucuuuuaaaauu

SEQ ID NO: 1381655 - RNA, 23 nt, Human
aggcuuuacagaacccuucugau

SEQ ID NO: 1381656 - RNA, 18 nt, Human
agucaggaaaaugaccca

SEQ ID NO: 1381657 - RNA, 20 nt, Human
auacaaacaucuccaaaaau

SEQ ID NO: 1381658 - RNA, 21 nt, Human
auaggucauauaacaucuguu

SEQ ID NO: 1381659 - RNA, 18 nt, Human
aucccaccacccuccucc

SEQ ID NO: 1381660 - RNA, 20 nt, Human
aucccaccacccuccuccaa

SEQ ID NO: 1381661 - RNA, 18 nt, Human
aucuguaugauuuucccc

SEQ ID NO: 1381662 - RNA, 24 nt, Human
augcuucagguaaucaauuugcau

SEQ ID NO: 1381663 - RNA, 21 nt, Human
caaaaaaacuccaaaccagca

SEQ ID NO: 1381664 - RNA, 18 nt, Human
caaaaaaccaacagccac

SEQ ID NO: 1381665 - RNA, 19 nt, Human
caaagucuuacagcaaaca

SEQ ID NO: 1381666 - RNA, 26 nt, Human
caaauuuucuuuccauguauagaggc

SEQ ID NO: 1381667 - RNA, 18 nt, Human
cacugccucuugagucac

SEQ ID NO: 1381668 - RNA, 22 nt, Human
cagaaaacccacccaaaacaaa

SEQ ID NO: 1381669 - RNA, 18 nt, Human
cagccacauaaucugugu

SEQ ID NO: 1381670 - RNA, 21 nt, Human
caucccaccacccuccuccaa

SEQ ID NO: 1381671 - RNA, 23 nt, Human
caucccaccacccuccuccaacu

SEQ ID NO: 1381672 - RNA, 25 nt, Human
caucccaccacccuccuccaacuaa

SEQ ID NO: 1381673 - RNA, 23 nt, Human
caucucaaaaaaccaacagccac

SEQ ID NO: 1381674 - RNA, 20 nt, Human
cauguugaggaaaaucuguc

SEQ ID NO: 1381675 - RNA, 21 nt, Human
ccaaaccagcauuuggccaac

SEQ ID NO: 1381676 - RNA, 24 nt, Human
ccaguagcuucuuaauuaaacccu

SEQ ID NO: 1381677 - RNA, 26 nt, Human
cccaacguuuucaacuacugccccaa

SEQ ID NO: 1381678 - RNA, 18 nt, Human
cccaccacccuccuccaa

SEQ ID NO: 1381679 - RNA, 22 nt, Human
ccucaaaaaaacuccaaaccag

SEQ ID NO: 1381680 - RNA, 23 nt, Human
cucaaaaaaacuccaaaccagca

SEQ ID NO: 1381681 - RNA, 18 nt, Human
cucaaaaaaccaacagcc

SEQ ID NO: 1381682 - RNA, 24 nt, Human
cucaaaaaaccaacagccacauaa

SEQ ID NO: 1381683 - RNA, 19 nt, Human
cuccuccuaggcaaaaaaa

SEQ ID NO: 1381684 - RNA, 23 nt, Human
cucuugagucacagauuuucaac

SEQ ID NO: 1381685 - RNA, 23 nt, Human
cugacagacaacugaaacaaaga

SEQ ID NO: 1381686 - RNA, 24 nt, Human
cuggcuccuccuaggcaaaaaaaa

SEQ ID NO: 1381687 - RNA, 23 nt, Human
cuuagaauuaauacuuccaauaa

SEQ ID NO: 1381688 - RNA, 25 nt, Human
gaaaaacuuaaaaacacagacacaa

SEQ ID NO: 1381689 - RNA, 19 nt, Human
gaaagcauacugugcaacc

SEQ ID NO: 1381690 - RNA, 20 nt, Human
gcagaaaacccacccaaaac

SEQ ID NO: 1381691 - RNA, 23 nt, Human
gcagaauaaagaaaaacuuaaaa

SEQ ID NO: 1381692 - RNA, 18 nt, Human
gccucuaucacuaggcac

SEQ ID NO: 1381693 - RNA, 20 nt, Human
gccuuuuuauucagcagauu

SEQ ID NO: 1381694 - RNA, 25 nt, Human
gcuagagucaggaaaaugacccagu

SEQ ID NO: 1381695 - RNA, 21 nt, Human
gucaucuuaaggguuguuucu

SEQ ID NO: 1381696 - RNA, 19 nt, Human
gugaacuuuaaauuccauu

SEQ ID NO: 1381697 - RNA, 19 nt, Human
uaaaaacacagacacaacc

SEQ ID NO: 1381698 - RNA, 20 nt, Human
uaaaaugacuaaaguaaaug

SEQ ID NO: 1381699 - RNA, 19 nt, Human
uaaaaugguuggcucacug

SEQ ID NO: 1381700 - RNA, 19 nt, Human
uaagaugucagguuugaaa

SEQ ID NO: 1381701 - RNA, 20 nt, Human
uaauaaaugggcuucucugu

SEQ ID NO: 1381702 - RNA, 22 nt, Human
uaauacaauauaaagaaggucc

SEQ ID NO: 1381703 - RNA, 18 nt, Human
uaauagaugacaaacaac

SEQ ID NO: 1381704 - RNA, 19 nt, Human
uaaucuguguuggaaacac

SEQ ID NO: 1381705 - RNA, 21 nt, Human
uacagcaaacacauaaagaaa

SEQ ID NO: 1381706 - RNA, 20 nt, Human
uacaguagcugauuacaaaa

SEQ ID NO: 1381707 - RNA, 22 nt, Human
uaccgcauucuauuuucaaggu

SEQ ID NO: 1381708 - RNA, 30 nt, Human
uacuauggaagaaauuagcauaaaaugacc

SEQ ID NO: 1381709 - RNA, 20 nt, Human
uacuuuauauauuagugaga

SEQ ID NO: 1381710 - RNA, 19 nt, Human
uagcagcaaaaaagcagaa

SEQ ID NO: 1381711 - RNA, 27 nt, Human
uagcagcaaaaaagcagaauaaagaaa

SEQ ID NO: 1381712 - RNA, 22 nt, Human
uagccaacaaauuuuuccccag

SEQ ID NO: 1381713 - RNA, 20 nt, Human
uagcuucuuaauuaaacccu

SEQ ID NO: 1381714 - RNA, 22 nt, Human
uauaauagaugacaaacaacgc

SEQ ID NO: 1381715 - RNA, 21 nt, Human
uaugacaucaucccaccaccc

SEQ ID NO: 1381716 - RNA, 19 nt, Human
ucaaaaaaacuccaaacca

SEQ ID NO: 1381717 - RNA, 21 nt, Human
ucaaaaaaccaacagccacau

SEQ ID NO: 1381718 - RNA, 18 nt, Human
ucacugccucuugaguca

SEQ ID NO: 1381719 - RNA, 21 nt, Human
uccaaguuuaaugcccaggau

SEQ ID NO: 1381720 - RNA, 21 nt, Human
uccccagaaaacaguauucug

SEQ ID NO: 1381721 - RNA, 26 nt, Human
uccccagaaaacaguauucuguucac

SEQ ID NO: 1381722 - RNA, 24 nt, Human
uccucaaaaaaacuccaaaccagc

SEQ ID NO: 1381723 - RNA, 20 nt, Human
ucuccaaaaauauugggagu

SEQ ID NO: 1381724 - RNA, 18 nt, Human
ugaaagcauacugugcaa

SEQ ID NO: 1381725 - RNA, 18 nt, Human
ugacaucaucccaccacc

SEQ ID NO: 1381726 - RNA, 21 nt, Human
ugacuugggaauccaaaaguc

SEQ ID NO: 1381727 - RNA, 23 nt, Human
ugagacuagaaacaguaaagugc

SEQ ID NO: 1381728 - RNA, 19 nt, Human
ugagagacaggcuuagaau

SEQ ID NO: 1381729 - RNA, 18 nt, Human
ugauaugacaucauccca

SEQ ID NO: 1381730 - RNA, 23 nt, Human
ugauuccucaaaaaaacuccaaa

SEQ ID NO: 1381731 - RNA, 22 nt, Human
ugcacugucaucucaaaaaacc

SEQ ID NO: 1381732 - RNA, 23 nt, Human
ugcacugucaucucaaaaaacca

SEQ ID NO: 1381733 - RNA, 23 nt, Human
ugcacugucaucucaaaaaaccu

SEQ ID NO: 1381734 - RNA, 23 nt, Human
uggcuccuccuaggcaaaaaaaa

SEQ ID NO: 1381735 - RNA, 22 nt, Human
uuaaaauuuuggaaagagagua

SEQ ID NO: 1381736 - RNA, 23 nt, Human
uugagucacagauuuucaacugg

SEQ ID NO: 1381737 - RNA, 23 nt, Human
uuuguucucucucccaaauccuu

SEQ ID NO: 1381738 - RNA, 18 nt, Human
uuuuaaaauuucauucac

SEQ ID NO: 1381739 - RNA, 18 nt, Human
aaagaaauaaagggggcc

SEQ ID NO: 1381740 - RNA, 22 nt, Human
aacaaagcacccccacugugcu

SEQ ID NO: 1381741 - RNA, 24 nt, Human
aaugcacuccagccugggcaacag

SEQ ID NO: 1381742 - RNA, 24 nt, Human
acagaaacaaaguauagagaaaga

SEQ ID NO: 1381743 - RNA, 19 nt, Human
acaguagcucacaccugga

SEQ ID NO: 1381744 - RNA, 18 nt, Human
acagugagacccugucuc

SEQ ID NO: 1381745 - RNA, 30 nt, Human
accuggaauccuagcgcuuugggaggccaa

SEQ ID NO: 1381746 - RNA, 22 nt, Human
acuccagccugggcaacaguga

SEQ ID NO: 1381747 - RNA, 19 nt, Human
acuccaggcccccuuuacc

SEQ ID NO: 1381748 - RNA, 22 nt, Human
agaaagaaauaaagggggccca

SEQ ID NO: 1381749 - RNA, 25 nt, Human
agaaagaaauaaagggggcccaggg

SEQ ID NO: 1381750 - RNA, 21 nt, Human
agcugggcacaguagcucaca

SEQ ID NO: 1381751 - RNA, 20 nt, Human
aggaggcugaggcaggaggg

SEQ ID NO: 1381752 - RNA, 18 nt, Human
aggcaggagggucacuug

SEQ ID NO: 1381753 - RNA, 21 nt, Human
aggcugaggcaggagggucac

SEQ ID NO: 1381754 - RNA, 24 nt, Human
aggcugaggcaggagggucacuug

SEQ ID NO: 1381755 - RNA, 24 nt, Human
aguagcucacaccuggaauccuag

SEQ ID NO: 1381756 - RNA, 24 nt, Human
aucacaucaaugcacuccagccug

SEQ ID NO: 1381757 - RNA, 18 nt, Human
augcacuccagccugggc

SEQ ID NO: 1381758 - RNA, 20 nt, Human
caacaaagcacccccacugu

SEQ ID NO: 1381759 - RNA, 20 nt, Human
caacagugagacccugucuc

SEQ ID NO: 1381760 - RNA, 23 nt, Human
caacuccaggcccccuuuacccc

SEQ ID NO: 1381761 - RNA, 19 nt, Human
caaugcacuccagccuggg

SEQ ID NO: 1381762 - RNA, 22 nt, Human
caaugcacuccagccugggcaa

SEQ ID NO: 1381763 - RNA, 23 nt, Human
caaugcacuccagccugggcaac

SEQ ID NO: 1381764 - RNA, 24 nt, Human
caaugcacuccagccugggcaaca

SEQ ID NO: 1381765 - RNA, 24 nt, Human
cacaccuggaauccuagcgcuuug

SEQ ID NO: 1381766 - RNA, 21 nt, Human
cacagaucacgcaacacacag

SEQ ID NO: 1381767 - RNA, 26 nt, Human
cacaucaaugcacuccagccugggca

SEQ ID NO: 1381768 - RNA, 22 nt, Human
caccaagaccccaucucuacaa

SEQ ID NO: 1381769 - RNA, 23 nt, Human
caccaagaccccaucucuacaaa

SEQ ID NO: 1381770 - RNA, 25 nt, Human
caccaagaccccaucucuacaaaaa

SEQ ID NO: 1381771 - RNA, 21 nt, Human
cacccugaugcccccaucugg

SEQ ID NO: 1381772 - RNA, 24 nt, Human
caccuggaauccuagcgcuuuggg

SEQ ID NO: 1381773 - RNA, 21 nt, Human
caccuguaguccccaggaggg

SEQ ID NO: 1381774 - RNA, 22 nt, Human
cacgcaacacacaggaagacac

SEQ ID NO: 1381775 - RNA, 20 nt, Human
cacuccagccugggcaacag

SEQ ID NO: 1381776 - RNA, 21 nt, Human
cacuccagccugggcaacagu

SEQ ID NO: 1381777 - RNA, 22 nt, Human
cacuccagccugggcaacagug

SEQ ID NO: 1381778 - RNA, 24 nt, Human
caucaaugcacuccagccugggca

SEQ ID NO: 1381779 - RNA, 25 nt, Human
ccacaguagccuggcagcuaccugu

SEQ ID NO: 1381780 - RNA, 22 nt, Human
ccaucuggagacucucgggaca

SEQ ID NO: 1381781 - RNA, 19 nt, Human
cccacugugcuuggcagcc

SEQ ID NO: 1381782 - RNA, 19 nt, Human
cccagggccacacuggcuu

SEQ ID NO: 1381783 - RNA, 19 nt, Human
cccugucucaaaaaaaaaa

SEQ ID NO: 1381784 - RNA, 25 nt, Human
ccucacccugaugcccccaucugga

SEQ ID NO: 1381785 - RNA, 23 nt, Human
ccugucucaaaaaaaaaaaaaaa

SEQ ID NO: 1381786 - RNA, 24 nt, Human
ccugucucaaaaaaaaaaaaaaaa

SEQ ID NO: 1381787 - RNA, 24 nt, Human
cgagaccagggugaaaaaucugcu

SEQ ID NO: 1381788 - RNA, 24 nt, Human
cucacaccuggaauccuagcgcuu

SEQ ID NO: 1381789 - RNA, 19 nt, Human
cucacccugaugcccccau

SEQ ID NO: 1381790 - RNA, 18 nt, Human
cucaccguguaaggcaau

SEQ ID NO: 1381791 - RNA, 21 nt, Human
gaaaaagacacagaaacaaag

SEQ ID NO: 1381792 - RNA, 19 nt, Human
gagagacuuuggaagagaa

SEQ ID NO: 1381793 - RNA, 23 nt, Human
gagccgggaggucaaggcuguug

SEQ ID NO: 1381794 - RNA, 18 nt, Human
gagucaguggcugccuga

SEQ ID NO: 1381795 - RNA, 24 nt, Human
gauugcuuaagacuaggaguuuga

SEQ ID NO: 1381796 - RNA, 20 nt, Human
gcccaagucuuggucuggaa

SEQ ID NO: 1381797 - RNA, 18 nt, Human
gcgcuuugggaggccaaa

SEQ ID NO: 1381798 - RNA, 21 nt, Human
gcuguuguaagcuaagaucac

SEQ ID NO: 1381799 - RNA, 23 nt, Human
ggaacgagagacuuuggaagaga

SEQ ID NO: 1381800 - RNA, 20 nt, Human
ggcacaguagcucacaccug

SEQ ID NO: 1381801 - RNA, 23 nt, Human
ggguacucaggaggcugaggcag

SEQ ID NO: 1381802 - RNA, 24 nt, Human
ggguaugguagcacgcaccuguag

SEQ ID NO: 1381803 - RNA, 19 nt, Human
gucuuggucuggaagcacu

SEQ ID NO: 1381804 - RNA, 20 nt, Human
uaaagggggcccaggggacc

SEQ ID NO: 1381805 - RNA, 21 nt, Human
uagcgcuuugggaggccaaag

SEQ ID NO: 1381806 - RNA, 24 nt, Human
uagcgcuuugggaggccaaagcag

SEQ ID NO: 1381807 - RNA, 19 nt, Human
uauucccaaguucuugcuu

SEQ ID NO: 1381808 - RNA, 21 nt, Human
ucaaugcacuccagccugggc

SEQ ID NO: 1381809 - RNA, 24 nt, Human
ucaaugcacuccagccugggcaac

SEQ ID NO: 1381810 - RNA, 22 nt, Human
ucacuugagccgggaggucaag

SEQ ID NO: 1381811 - RNA, 19 nt, Human
uccaacaaagcacccccac

SEQ ID NO: 1381812 - RNA, 22 nt, Human
uccagccugggcaacagugaga

SEQ ID NO: 1381813 - RNA, 18 nt, Human
ucccaaguucuugcuucu

SEQ ID NO: 1381814 - RNA, 18 nt, Human
ucccaaguucuugcuucu

SEQ ID NO: 1381815 - RNA, 21 nt, Human
ucccaaguucuugcuucuuuu

SEQ ID NO: 1381816 - RNA, 26 nt, Human
ucuccacaguagccuggcagcuaccu

SEQ ID NO: 1381817 - RNA, 23 nt, Human
ucuggaagcacuggggcccugga

SEQ ID NO: 1381818 - RNA, 18 nt, Human
ucuguggucagagggaga

SEQ ID NO: 1381819 - RNA, 19 nt, Human
ugagagggguaaucucugg

SEQ ID NO: 1381820 - RNA, 21 nt, Human
ugaggagucuguggucagagg

SEQ ID NO: 1381821 - RNA, 21 nt, Human
ugaggagucuguggucagagg

SEQ ID NO: 1381822 - RNA, 20 nt, Human
ugaggcaggagggucacuug

SEQ ID NO: 1381823 - RNA, 22 nt, Human
uggaagagaaaaagacacagaa

SEQ ID NO: 1381824 - RNA, 21 nt, Human
uggcccaagucuuggucugga

SEQ ID NO: 1381825 - RNA, 21 nt, Human
ugggacgaugacccaagaguc

SEQ ID NO: 1381826 - RNA, 22 nt, Human
ugggcaacagugagacccuguc

SEQ ID NO: 1381827 - RNA, 23 nt, Human
uggggcccuggacccaggcacug

SEQ ID NO: 1381828 - RNA, 27 nt, Human
uggggcccuggacccaggcacugaguu

SEQ ID NO: 1381829 - RNA, 21 nt, Human
ugucuuuaaagccaagugcca

SEQ ID NO: 1381830 - RNA, 22 nt, Human
uuagcuggguaugguagcacgc

SEQ ID NO: 1381831 - RNA, 18 nt, Human
uugaacaacuggcguguc

SEQ ID NO: 1381832 - RNA, 22 nt, Human
aaccccugggcacaagcaaucc

SEQ ID NO: 1381833 - RNA, 25 nt, Human
aagcaauccucccacgucagccucc

SEQ ID NO: 1381834 - RNA, 18 nt, Human
agccuccugaauagcugg

SEQ ID NO: 1381835 - RNA, 24 nt, Human
agguucucugucgcccaggcugga

SEQ ID NO: 1381836 - RNA, 24 nt, Human
agugcagugguaugaucacagcuc

SEQ ID NO: 1381837 - RNA, 24 nt, Human
agugguaugaucacagcucacugc

SEQ ID NO: 1381838 - RNA, 20 nt, Human
auuuauuuuucauuuuccuu

SEQ ID NO: 1381839 - RNA, 24 nt, Human
caaccccugggcacaagcaauccu

SEQ ID NO: 1381840 - RNA, 22 nt, Human
caagcaauccucccacgucagc

SEQ ID NO: 1381841 - RNA, 27 nt, Human
caagcaauccucccacgucagccuccu

SEQ ID NO: 1381842 - RNA, 24 nt, Human
cacgucagccuccugaauagcugg

SEQ ID NO: 1381843 - RNA, 21 nt, Human
cacugaccacggaacaccuuc

SEQ ID NO: 1381844 - RNA, 19 nt, Human
ccaggagccgcuggggagg

SEQ ID NO: 1381845 - RNA, 18 nt, Human
cccagcuuuuuuuuuuuu

SEQ ID NO: 1381846 - RNA, 20 nt, Human
cccaggcuggagugcagugg

SEQ ID NO: 1381847 - RNA, 21 nt, Human
ccucacugaccacggaacacc

SEQ ID NO: 1381848 - RNA, 24 nt, Human
ccucccacgucagccuccugaaua

SEQ ID NO: 1381849 - RNA, 19 nt, Human
ccuucagcucucugcuggc

SEQ ID NO: 1381850 - RNA, 21 nt, Human
cgccucugcuuggcucagcuu

SEQ ID NO: 1381851 - RNA, 19 nt, Human
cgucagccuccugaauagc

SEQ ID NO: 1381852 - RNA, 24 nt, Human
cuccugaauagcugggacaacagg

SEQ ID NO: 1381853 - RNA, 18 nt, Human
cucugucgcccaggcugg

SEQ ID NO: 1381854 - RNA, 19 nt, Human
cucugucgcccaggcugga

SEQ ID NO: 1381855 - RNA, 21 nt, Human
cugcaccacuguguccaggga

SEQ ID NO: 1381856 - RNA, 20 nt, Human
cuucgugcagagccagugcc

SEQ ID NO: 1381857 - RNA, 18 nt, Human
gagugcagugguaugauc

SEQ ID NO: 1381858 - RNA, 24 nt, Human
gagugcagugguaugaucacagcu

SEQ ID NO: 1381859 - RNA, 21 nt, Human
gcaauccucccacgucagccu

SEQ ID NO: 1381860 - RNA, 23 nt, Human
gcccagcuuuuuuuuuuuuuuuu

SEQ ID NO: 1381861 - RNA, 20 nt, Human
gcccaggcuggagugcagug

SEQ ID NO: 1381862 - RNA, 21 nt, Human
ggacaaguguccugggcucuc

SEQ ID NO: 1381863 - RNA, 18 nt, Human
ggcccuggaggaggagcu

SEQ ID NO: 1381864 - RNA, 21 nt, Human
gugugcaccaccaugcccagc

SEQ ID NO: 1381865 - RNA, 22 nt, Human
guucucugucgcccaggcugga

SEQ ID NO: 1381866 - RNA, 24 nt, Human
guucucugucgcccaggcuggagu

SEQ ID NO: 1381867 - RNA, 23 nt, Human
ucacugcagccugcaaccccugg

SEQ ID NO: 1381868 - RNA, 24 nt, Human
ucacugcagccugcaaccccuggg

SEQ ID NO: 1381869 - RNA, 22 nt, Human
ucgcccaggcuggagugcagug

SEQ ID NO: 1381870 - RNA, 19 nt, Human
ucucugucgcccaggcugg

SEQ ID NO: 1381871 - RNA, 25 nt, Human
ucucugucgcccaggcuggagugca

SEQ ID NO: 1381872 - RNA, 24 nt, Human
ucugucgcccaggcuggagugcag

SEQ ID NO: 1381873 - RNA, 19 nt, Human
ugaggagaucuucgugcag

SEQ ID NO: 1381874 - RNA, 19 nt, Human
uggagugcagugguaugau

SEQ ID NO: 1381875 - RNA, 19 nt, Human
uggagugcagugguaugau

SEQ ID NO: 1381876 - RNA, 28 nt, Human
uggagugcagugguaugauggcucuagc

SEQ ID NO: 1381877 - RNA, 24 nt, Human
ugguaugaucacagcucacugcag

SEQ ID NO: 1381878 - RNA, 21 nt, Human
uguccugggcucuccgugggg

SEQ ID NO: 1381879 - RNA, 27 nt, Human
uguccugggcucuccguggggagcugg

SEQ ID NO: 1381880 - RNA, 24 nt, Human
uucucugucgcccaggcuggagug

SEQ ID NO: 1381881 - RNA, 19 nt, Human
uuggcccaagcauggcugc

SEQ ID NO: 1381882 - RNA, 21 nt, Human
uuuuuagagagguucucuguc

SEQ ID NO: 1381883 - RNA, 29 nt, Human
uuuuuuuuuuuuucuuguagcgauagggg

SEQ ID NO: 1381884 - RNA, 18 nt, Human
uuuuuuuuuuuuuucuug

SEQ ID NO: 1381885 - RNA, 19 nt, Human
uuuuuuuuuuuuuucuugu

SEQ ID NO: 1381886 - RNA, 22 nt, Human
aaaaaaaaaaaaagaaagaaag

SEQ ID NO: 1381887 - RNA, 22 nt, Human
aaaaaaaaaaaagaaagaaaga

SEQ ID NO: 1381888 - RNA, 23 nt, Human
aaaaaaaaaagaaagaaagaaag

SEQ ID NO: 1381889 - RNA, 25 nt, Human
aaaaaaaaaagaaagaaagaaagaa

SEQ ID NO: 1381890 - RNA, 30 nt, Human
aaaagaaagaaagaaagaaagaaacagggg

SEQ ID NO: 1381891 - RNA, 27 nt, Human
aaaugacccucuugccucggccuccca

SEQ ID NO: 1381892 - RNA, 23 nt, Human
aaauugcugggauuauaggcaug

SEQ ID NO: 1381893 - RNA, 18 nt, Human
aacacagugaaaccccgc

SEQ ID NO: 1381894 - RNA, 20 nt, Human
aacacagugaaaccccgccu

SEQ ID NO: 1381895 - RNA, 21 nt, Human
aacacagugaaaccccgccuc

SEQ ID NO: 1381896 - RNA, 21 nt, Human
aagaaagaaagaaagaaagaa

SEQ ID NO: 1381897 - RNA, 18 nt, Human
aagaaggccccacagaug

SEQ ID NO: 1381898 - RNA, 18 nt, Human
aagcuggcugggccaaag

SEQ ID NO: 1381899 - RNA, 18 nt, Human
aaggaggcaaaagaccua

SEQ ID NO: 1381900 - RNA, 19 nt, Human
aaggccucaaauacuccuc

SEQ ID NO: 1381901 - RNA, 21 nt, Human
aagggccagacagaccaacag

SEQ ID NO: 1381902 - RNA, 18 nt, Human
aaugacccucuugccucg

SEQ ID NO: 1381903 - RNA, 25 nt, Human
aaugacccucuugccucggccuccc

SEQ ID NO: 1381904 - RNA, 22 nt, Human
acacaugcaggugccccugggc

SEQ ID NO: 1381905 - RNA, 24 nt, Human
accccgccucuacuaaaaauacaa

SEQ ID NO: 1381906 - RNA, 22 nt, Human
acgccacugcacuccagccugg

SEQ ID NO: 1381907 - RNA, 24 nt, Human
acgccacugcacuccagccugggc

SEQ ID NO: 1381908 - RNA, 19 nt, Human
acucacuguagccuuaccu

SEQ ID NO: 1381909 - RNA, 24 nt, Human
acuccagccugggcgccagaacaa

SEQ ID NO: 1381910 - RNA, 18 nt, Human
acugaagcugccgucccc

SEQ ID NO: 1381911 - RNA, 19 nt, Human
acugcacuccagccugggc

SEQ ID NO: 1381912 - RNA, 24 nt, Human
acugcacuccagccugggcgccag

SEQ ID NO: 1381913 - RNA, 21 nt, Human
acuggacauggguguggaagc

SEQ ID NO: 1381914 - RNA, 19 nt, Human
agacucaaggcaggggugg

SEQ ID NO: 1381915 - RNA, 21 nt, Human
agacucaaggcaggggugggg

SEQ ID NO: 1381916 - RNA, 24 nt, Human
agcacuuugggaggcugagauggg

SEQ ID NO: 1381917 - RNA, 19 nt, Human
agcaggaggcuggguguuc

SEQ ID NO: 1381918 - RNA, 24 nt, Human
agccugggcgccagaacaagacuc

SEQ ID NO: 1381919 - RNA, 20 nt, Human
agcugggcaugguggugggc

SEQ ID NO: 1381920 - RNA, 21 nt, Human
aggaggcaaaagaccuaaaac

SEQ ID NO: 1381921 - RNA, 18 nt, Human
aggcaggagaauggugug

SEQ ID NO: 1381922 - RNA, 22 nt, Human
aggcaggagaauggugugaacc

SEQ ID NO: 1381923 - RNA, 24 nt, Human
aggcaggagaauggugugaacccg

SEQ ID NO: 1381924 - RNA, 21 nt, Human
aggcaggauacagaggccaag

SEQ ID NO: 1381925 - RNA, 22 nt, Human
aggcaggauacagaggccaaga

SEQ ID NO: 1381926 - RNA, 19 nt, Human
aggcagggguggggcaagg

SEQ ID NO: 1381927 - RNA, 24 nt, Human
aggcagggguggggcaaggcagga

SEQ ID NO: 1381928 - RNA, 24 nt, Human
aggcgagguggcucaugccuguaa

SEQ ID NO: 1381929 - RNA, 23 nt, Human
aggcuggguguucugggcccugc

SEQ ID NO: 1381930 - RNA, 24 nt, Human
agguggagcuugcagugagccaag

SEQ ID NO: 1381931 - RNA, 24 nt, Human
aucacgccacugcacuccagccug

SEQ ID NO: 1381932 - RNA, 25 nt, Human
aucaugagaucaagagaucgagacc

SEQ ID NO: 1381933 - RNA, 23 nt, Human
augcaggugccccugggccucac

SEQ ID NO: 1381934 - RNA, 19 nt, Human
augccuguaaucccagcac

SEQ ID NO: 1381935 - RNA, 18 nt, Human
auggccuucuucuguucc

SEQ ID NO: 1381936 - RNA, 20 nt, Human
augggguuuucccauguugg

SEQ ID NO: 1381937 - RNA, 24 nt, Human
caaaaaaaaaaaaaaaagaaagaa

SEQ ID NO: 1381938 - RNA, 24 nt, Human
caaauugcugggauuauaggcaug

SEQ ID NO: 1381939 - RNA, 18 nt, Human
caagaaagaguaacugug

SEQ ID NO: 1381940 - RNA, 21 nt, Human
caagaccagaucugaagcugg

SEQ ID NO: 1381941 - RNA, 21 nt, Human
caagacuccaucucaaaaaaa

SEQ ID NO: 1381942 - RNA, 24 nt, Human
caagaucacgccacugcacuccag

SEQ ID NO: 1381943 - RNA, 22 nt, Human
caccaccacgcccagcuaauuu

SEQ ID NO: 1381944 - RNA, 24 nt, Human
caccacgcccagcuaauuuuugua

SEQ ID NO: 1381945 - RNA, 24 nt, Human
caccucagccucccaaguaacugg

SEQ ID NO: 1381946 - RNA, 18 nt, Human
cacugcacuccagccugg

SEQ ID NO: 1381947 - RNA, 19 nt, Human
cacugcacuccagccuggg

SEQ ID NO: 1381948 - RNA, 20 nt, Human
cacugcacuccagccugggc

SEQ ID NO: 1381949 - RNA, 27 nt, Human
cacugcacuccagccugggcgccagaa

SEQ ID NO: 1381950 - RNA, 21 nt, Human
cagaugccugcagcuccugcu

SEQ ID NO: 1381951 - RNA, 24 nt, Human
cagcacuuugggaggcugagaugg

SEQ ID NO: 1381952 - RNA, 28 nt, Human
cagcacuuugggaggcugagaugggcgg

SEQ ID NO: 1381953 - RNA, 18 nt, Human
cagcccuucaggcugggg

SEQ ID NO: 1381954 - RNA, 19 nt, Human
cagcugaggcggcagcggc

SEQ ID NO: 1381955 - RNA, 22 nt, Human
cagggugggcuccagggcugcc

SEQ ID NO: 1381956 - RNA, 23 nt, Human
caucuguagucccagcuacucgg

SEQ ID NO: 1381957 - RNA, 24 nt, Human
caugccuguaaucccagcacuuug

SEQ ID NO: 1381958 - RNA, 24 nt, Human
cauguuggccaagcugguuucgaa

SEQ ID NO: 1381959 - RNA, 18 nt, Human
ccaaauugcugggauuau

SEQ ID NO: 1381960 - RNA, 24 nt, Human
ccaaauugcugggauuauaggcau

SEQ ID NO: 1381961 - RNA, 19 nt, Human
ccaaguaacugguacaggc

SEQ ID NO: 1381962 - RNA, 22 nt, Human
ccaccccugccuauacacaugc

SEQ ID NO: 1381963 - RNA, 20 nt, Human
ccacugcacuccagccuggg

SEQ ID NO: 1381964 - RNA, 20 nt, Human
ccacugcacuccagccuggg

SEQ ID NO: 1381965 - RNA, 21 nt, Human
ccacugcacuccagccugggc

SEQ ID NO: 1381966 - RNA, 21 nt, Human
ccacugcacuccagccugggc

SEQ ID NO: 1381967 - RNA, 22 nt, Human
ccacugcacuccagccugggcg

SEQ ID NO: 1381968 - RNA, 23 nt, Human
ccacugcacuccagccugggcgc

SEQ ID NO: 1381969 - RNA, 19 nt, Human
ccagagccuacucggugac

SEQ ID NO: 1381970 - RNA, 21 nt, Human
ccagccuugcggaagagcuga

SEQ ID NO: 1381971 - RNA, 24 nt, Human
ccagggcucaaucaaucccuucuc

SEQ ID NO: 1381972 - RNA, 19 nt, Human
ccauguuggccaagcuggu

SEQ ID NO: 1381973 - RNA, 23 nt, Human
ccauguuggccaagcugguuucg

SEQ ID NO: 1381974 - RNA, 18 nt, Human
ccccaagggccgcugccu

SEQ ID NO: 1381975 - RNA, 19 nt, Human
ccccagggaauaccagccu

SEQ ID NO: 1381976 - RNA, 20 nt, Human
ccccugggccucaccucagg

SEQ ID NO: 1381977 - RNA, 24 nt, Human
ccccugggccucaccucagguguc

SEQ ID NO: 1381978 - RNA, 19 nt, Human
cccgugcagccccuucagc

SEQ ID NO: 1381979 - RNA, 18 nt, Human
cccuggccuuaagggcuc

SEQ ID NO: 1381980 - RNA, 22 nt, Human
cccuggggcugcacugaagcuc

SEQ ID NO: 1381981 - RNA, 22 nt, Human
ccuauacacaugcaggugcccc

SEQ ID NO: 1381982 - RNA, 18 nt, Human
ccucaaauacuccucuuc

SEQ ID NO: 1381983 - RNA, 19 nt, Human
ccucgaggucgaagguagg

SEQ ID NO: 1381984 - RNA, 24 nt, Human
ccugcagcuccugcuccauggccu

SEQ ID NO: 1381985 - RNA, 26 nt, Human
ccugcuccauggccuucuucuguucc

SEQ ID NO: 1381986 - RNA, 19 nt, Human
ccugcuccguguccucacc

SEQ ID NO: 1381987 - RNA, 23 nt, Human
ccuggcuaacacagugaaacccc

SEQ ID NO: 1381988 - RNA, 24 nt, Human
ccuggcuaacacagugaaaccccg

SEQ ID NO: 1381989 - RNA, 18 nt, Human
ccugggcccaaaugaccc

SEQ ID NO: 1381990 - RNA, 21 nt, Human
ccuggggcugcacugaagcug

SEQ ID NO: 1381991 - RNA, 22 nt, Human
ccuuacgcacaugggccucccc

SEQ ID NO: 1381992 - RNA, 23 nt, Human
ccuuacgcacaugggccuccccg

SEQ ID NO: 1381993 - RNA, 26 nt, Human
ccuuccgcugcuuaaaauccucugac

SEQ ID NO: 1381994 - RNA, 24 nt, Human
cgagaccauccuggcuaacacagu

SEQ ID NO: 1381995 - RNA, 24 nt, Human
cgccaaguauacuacccaccuccu

SEQ ID NO: 1381996 - RNA, 26 nt, Human
cgccacugcacuccagccugggcgcc

SEQ ID NO: 1381997 - RNA, 22 nt, Human
cgccagaacaagacuccaucuc

SEQ ID NO: 1381998 - RNA, 20 nt, Human
cggaagagcugaguuuggca

SEQ ID NO: 1381999 - RNA, 21 nt, Human
cggccacucagcuccagacac

SEQ ID NO: 1382000 - RNA, 24 nt, Human
cggccaggcgagguggcucaugcc

SEQ ID NO: 1382001 - RNA, 29 nt, Human
cgggagguggagcuugcagugacaacggu

SEQ ID NO: 1382002 - RNA, 24 nt, Human
cgggagguggagcuugcagugagc

SEQ ID NO: 1382003 - RNA, 23 nt, Human
cgugcaccaccacgcccagcuaa

SEQ ID NO: 1382004 - RNA, 25 nt, Human
cucaaaaaaaaaaaaaaaagaaaga

SEQ ID NO: 1382005 - RNA, 21 nt, Human
cucaaggcagggguggggcaa

SEQ ID NO: 1382006 - RNA, 19 nt, Human
cucaccucagccucccaag

SEQ ID NO: 1382007 - RNA, 24 nt, Human
cucaugccuguaaucccagcacuu

SEQ ID NO: 1382008 - RNA, 19 nt, Human
cuccaucucaaaaaaaaaa

SEQ ID NO: 1382009 - RNA, 18 nt, Human
cuccugucucacaauccc

SEQ ID NO: 1382010 - RNA, 20 nt, Human
cucuacuaaaaauacaaaaa

SEQ ID NO: 1382011 - RNA, 26 nt, Human
cugccaggccuuuguggaggccuggg

SEQ ID NO: 1382012 - RNA, 23 nt, Human
cugccuggacaagaaagaguaac

SEQ ID NO: 1382013 - RNA, 18 nt, Human
cuggaaugagaccucugu

SEQ ID NO: 1382014 - RNA, 18 nt, Human
cuggcuaacacagugaaa

SEQ ID NO: 1382015 - RNA, 21 nt, Human
cuguagucccagcuacucggg

SEQ ID NO: 1382016 - RNA, 27 nt, Human
cuuaaaauccucugacacaggcuaccc

SEQ ID NO: 1382017 - RNA, 20 nt, Human
cuugccucggccucccaaau

SEQ ID NO: 1382018 - RNA, 19 nt, Human
gaaaccccgccucuacuaa

SEQ ID NO: 1382019 - RNA, 22 nt, Human
gagagacacaagaaggccccac

SEQ ID NO: 1382020 - RNA, 18 nt, Human
gagcuugcagugagccaa

SEQ ID NO: 1382021 - RNA, 22 nt, Human
gagcuugcagugagccaagauc

SEQ ID NO: 1382022 - RNA, 18 nt, Human
gaggcaaaagaccuaaaa

SEQ ID NO: 1382023 - RNA, 20 nt, Human
gccaagaucacgccacugca

SEQ ID NO: 1382024 - RNA, 22 nt, Human
gccacugcacuccagccugggc

SEQ ID NO: 1382025 - RNA, 21 nt, Human
gccagaacaagacuccaucuc

SEQ ID NO: 1382026 - RNA, 21 nt, Human
gccucaaauacuccucuucca

SEQ ID NO: 1382027 - RNA, 24 nt, Human
gcuccagaggaggugcaggcaggc

SEQ ID NO: 1382028 - RNA, 18 nt, Human
gcuggguguucugggccc

SEQ ID NO: 1382029 - RNA, 20 nt, Human
gcugugcuuugucugggucc

SEQ ID NO: 1382030 - RNA, 23 nt, Human
ggagaaaggccaaaggcuuugau

SEQ ID NO: 1382031 - RNA, 18 nt, Human
ggagcaggaggcugggug

SEQ ID NO: 1382032 - RNA, 20 nt, Human
ggagcuugcagugagccaag

SEQ ID NO: 1382033 - RNA, 24 nt, Human
ggagcuugcagugagccaagauca

SEQ ID NO: 1382034 - RNA, 22 nt, Human
ggaucaugagaucaagagaucg

SEQ ID NO: 1382035 - RNA, 24 nt, Human
ggauuauaggcaugcaccaucaug

SEQ ID NO: 1382036 - RNA, 20 nt, Human
ggcaaggggguggggcaagg

SEQ ID NO: 1382037 - RNA, 23 nt, Human
ggcccaaaugacccucuugccuc

SEQ ID NO: 1382038 - RNA, 21 nt, Human
ggccugggaggagaaaggcca

SEQ ID NO: 1382039 - RNA, 21 nt, Human
ggcucaugccuguaaucccag

SEQ ID NO: 1382040 - RNA, 18 nt, Human
ggcuggggcuuggggugc

SEQ ID NO: 1382041 - RNA, 22 nt, Human
gggcaagggccagacagaccaa

SEQ ID NO: 1382042 - RNA, 22 nt, Human
gggcccaaaugacccucuugcc

SEQ ID NO: 1382043 - RNA, 19 nt, Human
gggcggaucaugagaucaa

SEQ ID NO: 1382044 - RNA, 24 nt, Human
ggggugcugcacuggacaugggug

SEQ ID NO: 1382045 - RNA, 18 nt, Human
gggguuuucccauguugg

SEQ ID NO: 1382046 - RNA, 20 nt, Human
gguccuggcgagagcucgcc

SEQ ID NO: 1382047 - RNA, 23 nt, Human
gguggcucaugccuguaauccca

SEQ ID NO: 1382048 - RNA, 24 nt, Human
gguggcucaugccuguaaucccag

SEQ ID NO: 1382049 - RNA, 21 nt, Human
ggugggcuccagggcugccuc

SEQ ID NO: 1382050 - RNA, 25 nt, Human
guaaaggaaggaggcaaaagaccua

SEQ ID NO: 1382051 - RNA, 21 nt, Human
guagagaugggguuuucccau

SEQ ID NO: 1382052 - RNA, 22 nt, Human
guagagaugggguuuucccaug

SEQ ID NO: 1382053 - RNA, 23 nt, Human
guggcucaugccuguaaucccag

SEQ ID NO: 1382054 - RNA, 18 nt, Human
guguguacaagugugggg

SEQ ID NO: 1382055 - RNA, 18 nt, Human
guguucugggcccugcuc

SEQ ID NO: 1382056 - RNA, 21 nt, Human
guuggcccuggccuuaagggc

SEQ ID NO: 1382057 - RNA, 19 nt, Human
guuuugguagagauggggu

SEQ ID NO: 1382058 - RNA, 27 nt, Human
uaauuuuuguauuuguuuugguagaga

SEQ ID NO: 1382059 - RNA, 24 nt, Human
uacaggcgugcaccaccacgccca

SEQ ID NO: 1382060 - RNA, 24 nt, Human
uacuguugugguuuaccugugguu

SEQ ID NO: 1382061 - RNA, 23 nt, Human
uauuuuugaaacagggucggcca

SEQ ID NO: 1382062 - RNA, 23 nt, Human
ucacgccacugcacuccagccug

SEQ ID NO: 1382063 - RNA, 21 nt, Human
ucacuguagccuuaccuucca

SEQ ID NO: 1382064 - RNA, 22 nt, Human
ucaugccuguaaucccagcacu

SEQ ID NO: 1382065 - RNA, 23 nt, Human
uccaucucaaaaaaaaaaaaaaa

SEQ ID NO: 1382066 - RNA, 29 nt, Human
uccaucucaaaaaaaaaaaaaaaagaaaa

SEQ ID NO: 1382067 - RNA, 24 nt, Human
ucccaaauugcugggauuauaggc

SEQ ID NO: 1382068 - RNA, 21 nt, Human
ucccagcaccucaagauccau

SEQ ID NO: 1382069 - RNA, 30 nt, Human
uccccagcgguggguagccgacuggccucc

SEQ ID NO: 1382070 - RNA, 20 nt, Human
uccccagggaauaccagccu

SEQ ID NO: 1382071 - RNA, 23 nt, Human
ucccuucucaccucagccuccca

SEQ ID NO: 1382072 - RNA, 19 nt, Human
uccugggcccaaaugaccc

SEQ ID NO: 1382073 - RNA, 21 nt, Human
uccugggcccaaaugacccuc

SEQ ID NO: 1382074 - RNA, 18 nt, Human
uccuucaguccacccugc

SEQ ID NO: 1382075 - RNA, 18 nt, Human
uccuugucuccaccccug

SEQ ID NO: 1382076 - RNA, 23 nt, Human
ucggccaggcgagguggcucaug

SEQ ID NO: 1382077 - RNA, 18 nt, Human
ucucaaaaaaaaaaaaaa

SEQ ID NO: 1382078 - RNA, 25 nt, Human
ucucaaaaaaaaaaaaaaaagaaag

SEQ ID NO: 1382079 - RNA, 20 nt, Human
ucugaggcccuguguggagg

SEQ ID NO: 1382080 - RNA, 19 nt, Human
ucugggucccccaggggac

SEQ ID NO: 1382081 - RNA, 21 nt, Human
ucuguagucccagcuacucgg

SEQ ID NO: 1382082 - RNA, 23 nt, Human
ucuugcucugccacccaucauga

SEQ ID NO: 1382083 - RNA, 24 nt, Human
ugaccagcccuucaggcuggggcu

SEQ ID NO: 1382084 - RNA, 24 nt, Human
ugagaugggcggaucaugagauca

SEQ ID NO: 1382085 - RNA, 25 nt, Human
ugaggcccuguguggaggaccccaa

SEQ ID NO: 1382086 - RNA, 26 nt, Human
ugaggcggcagcggcagacaggugcg

SEQ ID NO: 1382087 - RNA, 21 nt, Human
ugaggggugguggucugaucc

SEQ ID NO: 1382088 - RNA, 21 nt, Human
ugcacugaagcugccgucccc

SEQ ID NO: 1382089 - RNA, 18 nt, Human
ugcacuggacaugggugu

SEQ ID NO: 1382090 - RNA, 22 nt, Human
ugcacuggacauggguguggaa

SEQ ID NO: 1382091 - RNA, 21 nt, Human
ugccaggccuuuguggaggcc

SEQ ID NO: 1382092 - RNA, 27 nt, Human
ugcccagacucaaggcagggguggggc

SEQ ID NO: 1382093 - RNA, 21 nt, Human
ugcccggccacucagcuccag

SEQ ID NO: 1382094 - RNA, 26 nt, Human
ugccuauacacaugcaggugccccug

SEQ ID NO: 1382095 - RNA, 18 nt, Human
ugccucggccucccaaau

SEQ ID NO: 1382096 - RNA, 21 nt, Human
ugccucggccucccaaauugc

SEQ ID NO: 1382097 - RNA, 24 nt, Human
ugccucggccucccaaauugcugg

SEQ ID NO: 1382098 - RNA, 23 nt, Human
ugccuguaaucccagcacuuugg

SEQ ID NO: 1382099 - RNA, 24 nt, Human
ugccuguaaucccagcacuuuggg

SEQ ID NO: 1382100 - RNA, 19 nt, Human
ugcugggauuauaggcaug

SEQ ID NO: 1382101 - RNA, 23 nt, Human
ugcuuaaaauccucugacacagg

SEQ ID NO: 1382102 - RNA, 22 nt, Human
uggaagcuggcccuucccuggg

SEQ ID NO: 1382103 - RNA, 23 nt, Human
uggaagcuggcccuucccugggg

SEQ ID NO: 1382104 - RNA, 22 nt, Human
uggaaugagaccucugucugcc

SEQ ID NO: 1382105 - RNA, 21 nt, Human
uggcaagauagugguggggcc

SEQ ID NO: 1382106 - RNA, 22 nt, Human
uggcagaagccagagccuacuc

SEQ ID NO: 1382107 - RNA, 24 nt, Human
uggccaagcugguuucgaauuccu

SEQ ID NO: 1382108 - RNA, 24 nt, Human
uggcucaugccuguaaucccagca

SEQ ID NO: 1382109 - RNA, 24 nt, Human
uggcugggccaaagcagcugaggc

SEQ ID NO: 1382110 - RNA, 19 nt, Human
ugggaccgaugcccggcca

SEQ ID NO: 1382111 - RNA, 19 nt, Human
ugggaggcugagaugggcg

SEQ ID NO: 1382112 - RNA, 24 nt, Human
ugggaggcugagaugggcggauca

SEQ ID NO: 1382113 - RNA, 21 nt, Human
ugggauuauaggcaugcacca

SEQ ID NO: 1382114 - RNA, 22 nt, Human
ugggauuauaggcaugcaccau

SEQ ID NO: 1382115 - RNA, 25 nt, Human
ugggccaaagcagcugaggcggcag

SEQ ID NO: 1382116 - RNA, 18 nt, Human
uggggugggagcaggagg

SEQ ID NO: 1382117 - RNA, 20 nt, Human
uggggugggagcaggaggcu

SEQ ID NO: 1382118 - RNA, 21 nt, Human
uggggugggagcaggaggcug

SEQ ID NO: 1382119 - RNA, 18 nt, Human
uggguguggaagcuggcc

SEQ ID NO: 1382120 - RNA, 24 nt, Human
ugguagagaugggguuuucccaug

SEQ ID NO: 1382121 - RNA, 20 nt, Human
ugguggucugauccuucagu

SEQ ID NO: 1382122 - RNA, 24 nt, Human
ugguggugggcaucuguaguccca

SEQ ID NO: 1382123 - RNA, 28 nt, Human
ugugaggggugguggucugaccgugagg

SEQ ID NO: 1382124 - RNA, 24 nt, Human
uguggaagcuggcccuucccuggg

SEQ ID NO: 1382125 - RNA, 20 nt, Human
uguggaggaccccaagggcc

SEQ ID NO: 1382126 - RNA, 21 nt, Human
uguggaggaccccaagggccg

SEQ ID NO: 1382127 - RNA, 20 nt, Human
uguggcagaagccagagccu

SEQ ID NO: 1382128 - RNA, 23 nt, Human
uguggcagaagccagagccuacu

SEQ ID NO: 1382129 - RNA, 20 nt, Human
ugugguugggagagacacaa

SEQ ID NO: 1382130 - RNA, 18 nt, Human
uuagcucugaaggagaga

SEQ ID NO: 1382131 - RNA, 18 nt, Human
uuagcugggcaugguggu

SEQ ID NO: 1382132 - RNA, 23 nt, Human
uuagcugggcaugguggugggca

SEQ ID NO: 1382133 - RNA, 23 nt, Human
uuaggcaggagaauggugugaac

SEQ ID NO: 1382134 - RNA, 24 nt, Human
uuaggcaggagaauggugugaacc

SEQ ID NO: 1382135 - RNA, 22 nt, Human
uuccaggcagcgcugcagggag

SEQ ID NO: 1382136 - RNA, 22 nt, Human
uuccgcugcuuaaaauccucug

SEQ ID NO: 1382137 - RNA, 20 nt, Human
uugcagugagccaagaucac

SEQ ID NO: 1382138 - RNA, 24 nt, Human
uugguagagaugggguuuucccau

SEQ ID NO: 1382139 - RNA, 20 nt, Human
uuucccauguuggccaagcu

SEQ ID NO: 1382140 - RNA, 23 nt, Human
uuuuuguauuuguuuugguagag

SEQ ID NO: 1382141 - RNA, 26 nt, Human
uuuuuguauuuguuuugguagagaug

SEQ ID NO: 1382142 - RNA, 19 nt, Human
aaaaaaaaaagaaugacaa

SEQ ID NO: 1382143 - RNA, 21 nt, Human
aaaaaaaaaagaaugacaaua

SEQ ID NO: 1382144 - RNA, 22 nt, Human
aaagcaaaugugaauaagaggu

SEQ ID NO: 1382145 - RNA, 20 nt, Human
aacauggugaaacccugucu

SEQ ID NO: 1382146 - RNA, 21 nt, Human
aacauggugaaacccugucuc

SEQ ID NO: 1382147 - RNA, 23 nt, Human
aacgcacuccagccuggcgacag

SEQ ID NO: 1382148 - RNA, 27 nt, Human
aagcaaaugugaauaagagguuuccac

SEQ ID NO: 1382149 - RNA, 21 nt, Human
aaugcuuguugcaagaaugaa

SEQ ID NO: 1382150 - RNA, 24 nt, Human
acagagugagacucugucucaaaa

SEQ ID NO: 1382151 - RNA, 24 nt, Human
acccugucucuacuaaaaauacaa

SEQ ID NO: 1382152 - RNA, 19 nt, Human
accucagaucaugaggcau

SEQ ID NO: 1382153 - RNA, 23 nt, Human
accuguagucccagcuacucagg

SEQ ID NO: 1382154 - RNA, 22 nt, Human
acgcacuccagccuggcgacag

SEQ ID NO: 1382155 - RNA, 23 nt, Human
acuccagccuggcgacagaguga

SEQ ID NO: 1382156 - RNA, 22 nt, Human
agaaucgauugaacccaggagg

SEQ ID NO: 1382157 - RNA, 24 nt, Human
agcacuuugggaggcugaggcggg

SEQ ID NO: 1382158 - RNA, 21 nt, Human
agccuggcgacagagugagac

SEQ ID NO: 1382159 - RNA, 23 nt, Human
agccuggcgacagagugagacuc

SEQ ID NO: 1382160 - RNA, 24 nt, Human
agccuguaaucccagcacuuuggg

SEQ ID NO: 1382161 - RNA, 18 nt, Human
agcuguguaaguuuaaau

SEQ ID NO: 1382162 - RNA, 23 nt, Human
aggcaggagaaucgauugaaccc

SEQ ID NO: 1382163 - RNA, 24 nt, Human
aggcaggagaaucgauugaaccca

SEQ ID NO: 1382164 - RNA, 21 nt, Human
aggcggagguugcagugagcc

SEQ ID NO: 1382165 - RNA, 24 nt, Human
aggcggagguugcagugagccgag

SEQ ID NO: 1382166 - RNA, 24 nt, Human
aggcgggcagaucacgaggucagg

SEQ ID NO: 1382167 - RNA, 18 nt, Human
aggcguggagcucaggag

SEQ ID NO: 1382168 - RNA, 24 nt, Human
aggcugaggcaggagaaucgauug

SEQ ID NO: 1382169 - RNA, 19 nt, Human
aggugcucaauaaaugcuu

SEQ ID NO: 1382170 - RNA, 21 nt, Human
auccuggccaacauggugaaa

SEQ ID NO: 1382171 - RNA, 18 nt, Human
auggaagacaauuuuuuc

SEQ ID NO: 1382172 - RNA, 24 nt, Human
auugugccaacgcacuccagccug

SEQ ID NO: 1382173 - RNA, 18 nt, Human
auuugcccuggagagaac

SEQ ID NO: 1382174 - RNA, 21 nt, Human
caaaagucuaaggucucccca

SEQ ID NO: 1382175 - RNA, 24 nt, Human
caacauggugaaacccugucucua

SEQ ID NO: 1382176 - RNA, 19 nt, Human
cacaccuguagucccagcu

SEQ ID NO: 1382177 - RNA, 22 nt, Human
cacccaccgcucacccccugcu

SEQ ID NO: 1382178 - RNA, 21 nt, Human
cacccccugcuguguggccug

SEQ ID NO: 1382179 - RNA, 24 nt, Human
caccuguagucccagcuacucagg

SEQ ID NO: 1382180 - RNA, 21 nt, Human
cacuccagccuggcgacagag

SEQ ID NO: 1382181 - RNA, 21 nt, Human
cacuccagccuggcgacagag

SEQ ID NO: 1382182 - RNA, 23 nt, Human
cacuccagccuggcgacagagug

SEQ ID NO: 1382183 - RNA, 21 nt, Human
cagaauaucuaccucuacugg

SEQ ID NO: 1382184 - RNA, 24 nt, Human
cagcacuuugggaggcugaggcgg

SEQ ID NO: 1382185 - RNA, 25 nt, Human
cagcgggucccgccccgccacgucu

SEQ ID NO: 1382186 - RNA, 24 nt, Human
cagcuacucaggaggcugaggcag

SEQ ID NO: 1382187 - RNA, 20 nt, Human
caucaguauuuucuguccuu

SEQ ID NO: 1382188 - RNA, 23 nt, Human
caucaguauuuucuguccuuuag

SEQ ID NO: 1382189 - RNA, 22 nt, Human
ccaggaggcggagguugcagug

SEQ ID NO: 1382190 - RNA, 18 nt, Human
cccccugcuguguggccu

SEQ ID NO: 1382191 - RNA, 20 nt, Human
cccccugcuguguggccugg

SEQ ID NO: 1382192 - RNA, 21 nt, Human
cccgccacgucugcagggccg

SEQ ID NO: 1382193 - RNA, 19 nt, Human
cccgccccgccacgucugc

SEQ ID NO: 1382194 - RNA, 18 nt, Human
ccgccccgccacgucugc

SEQ ID NO: 1382195 - RNA, 19 nt, Human
ccgcucacccccugcugug

SEQ ID NO: 1382196 - RNA, 25 nt, Human
ccggccgggcgcgguggcucaagcc

SEQ ID NO: 1382197 - RNA, 22 nt, Human
ccuggccaacauggugaaaccc

SEQ ID NO: 1382198 - RNA, 22 nt, Human
ccuggccaacauggugaaaccc

SEQ ID NO: 1382199 - RNA, 24 nt, Human
ccuggccaacauggugaaacccug

SEQ ID NO: 1382200 - RNA, 21 nt, Human
ccuggcgacagagugagacuc

SEQ ID NO: 1382201 - RNA, 20 nt, Human
ccuguaaucccagcacuuug

SEQ ID NO: 1382202 - RNA, 21 nt, Human
ccuguagucccagcuacucag

SEQ ID NO: 1382203 - RNA, 18 nt, Human
ccuguauggaacaaaggc

SEQ ID NO: 1382204 - RNA, 24 nt, Human
ccuuguucuucaaaguuuuuaagg

SEQ ID NO: 1382205 - RNA, 24 nt, Human
cgagaccauccuggccaacauggu

SEQ ID NO: 1382206 - RNA, 24 nt, Human
cgagauugugccaacgcacuccag

SEQ ID NO: 1382207 - RNA, 22 nt, Human
cggcacgaagcuauucaaccuc

SEQ ID NO: 1382208 - RNA, 22 nt, Human
cgggcagaucacgaggucagga

SEQ ID NO: 1382209 - RNA, 23 nt, Human
cuaaggucuccccaugaguuucu

SEQ ID NO: 1382210 - RNA, 25 nt, Human
cucaaaaaaaaaaaaaaaaaaagaa

SEQ ID NO: 1382211 - RNA, 24 nt, Human
cucaagccuguaaucccagcacuu

SEQ ID NO: 1382212 - RNA, 18 nt, Human
cucacccaccgcucaccc

SEQ ID NO: 1382213 - RNA, 23 nt, Human
cucacucacccaccgcucacccc

SEQ ID NO: 1382214 - RNA, 24 nt, Human
cuccagccuggcgacagagugaga

SEQ ID NO: 1382215 - RNA, 19 nt, Human
cucugucucaaaaaaaaaa

SEQ ID NO: 1382216 - RNA, 18 nt, Human
cugcagggccggcgggga

SEQ ID NO: 1382217 - RNA, 24 nt, Human
cuggccaacauggugaaacccugu

SEQ ID NO: 1382218 - RNA, 18 nt, Human
cuguggccuggggguggg

SEQ ID NO: 1382219 - RNA, 19 nt, Human
gaaacccugucucuacuaa

SEQ ID NO: 1382220 - RNA, 22 nt, Human
gaacacgaauauuuguaaauaa

SEQ ID NO: 1382221 - RNA, 18 nt, Human
gaaggcguggagcucagg

SEQ ID NO: 1382222 - RNA, 22 nt, Human
gaaugaccggccgggcgcggug

SEQ ID NO: 1382223 - RNA, 24 nt, Human
gacagagugagacucugucucaaa

SEQ ID NO: 1382224 - RNA, 23 nt, Human
gagguugcagugagccgagauug

SEQ ID NO: 1382225 - RNA, 22 nt, Human
gcacuccagccuggcgacagag

SEQ ID NO: 1382226 - RNA, 22 nt, Human
gcacuccagccuggcgacagag

SEQ ID NO: 1382227 - RNA, 22 nt, Human
gcaggagaaucgauugaaccca

SEQ ID NO: 1382228 - RNA, 24 nt, Human
gccaacauggugaaacccugucuc

SEQ ID NO: 1382229 - RNA, 23 nt, Human
gccaggcgcacagagaacauccc

SEQ ID NO: 1382230 - RNA, 22 nt, Human
gccagugguccccaaccuuucu

SEQ ID NO: 1382231 - RNA, 24 nt, Human
gcgacagagugagacucugucuca

SEQ ID NO: 1382232 - RNA, 22 nt, Human
gcugggcgugguggcacacacc

SEQ ID NO: 1382233 - RNA, 22 nt, Human
ggaggcggagguugcagugagc

SEQ ID NO: 1382234 - RNA, 22 nt, Human
ggagguugcagugagccgagau

SEQ ID NO: 1382235 - RNA, 24 nt, Human
ggagguugcagugagccgagauug

SEQ ID NO: 1382236 - RNA, 25 nt, Human
ggccaggcgcacagagaacaucccc

SEQ ID NO: 1382237 - RNA, 24 nt, Human
ggccgcagggucuucugugcagcc

SEQ ID NO: 1382238 - RNA, 19 nt, Human
ggcgacagagugagacucu

SEQ ID NO: 1382239 - RNA, 23 nt, Human
ggcgcgguggcucaagccuguaa

SEQ ID NO: 1382240 - RNA, 22 nt, Human
ggcgugguggcacacaccugua

SEQ ID NO: 1382241 - RNA, 21 nt, Human
ggcucaagccuguaaucccag

SEQ ID NO: 1382242 - RNA, 24 nt, Human
gggcagaucacgaggucaggagau

SEQ ID NO: 1382243 - RNA, 20 nt, Human
ggguagcgggaugggggugg

SEQ ID NO: 1382244 - RNA, 23 nt, Human
gguggcucaagccuguaauccca

SEQ ID NO: 1382245 - RNA, 24 nt, Human
gguggcucaagccuguaaucccag

SEQ ID NO: 1382246 - RNA, 19 nt, Human
gugaagcagguguauugua

SEQ ID NO: 1382247 - RNA, 24 nt, Human
guugcagugagccgagauugugcc

SEQ ID NO: 1382248 - RNA, 21 nt, Human
uaaaauauccuuacuuugccu

SEQ ID NO: 1382249 - RNA, 21 nt, Human
uaaauacagaugaagcugugc

SEQ ID NO: 1382250 - RNA, 24 nt, Human
uaaauuaacauaaagaaaacacaa

SEQ ID NO: 1382251 - RNA, 18 nt, Human
uaacaaaacaaaguucag

SEQ ID NO: 1382252 - RNA, 18 nt, Human
uaacucucucuaaauuug

SEQ ID NO: 1382253 - RNA, 24 nt, Human
uaagagguuuccaccuugcaaaac

SEQ ID NO: 1382254 - RNA, 21 nt, Human
uacagaugaagcugugcucac

SEQ ID NO: 1382255 - RNA, 20 nt, Human
uacaguacauagacaaauga

SEQ ID NO: 1382256 - RNA, 19 nt, Human
uaccuguagggauguccau

SEQ ID NO: 1382257 - RNA, 26 nt, Human
uaccuuguucuucaaaguuuuuaagg

SEQ ID NO: 1382258 - RNA, 18 nt, Human
uacuggucuguggccugg

SEQ ID NO: 1382259 - RNA, 20 nt, Human
ucaaaaaaaaaaaaaaaaaa

SEQ ID NO: 1382260 - RNA, 25 nt, Human
ucaaaaaaaaaaaaaaaaaaagaau

SEQ ID NO: 1382261 - RNA, 26 nt, Human
ucaaagcaaaugugaauaagagguuu

SEQ ID NO: 1382262 - RNA, 21 nt, Human
ucacccccugcuguguggccu

SEQ ID NO: 1382263 - RNA, 18 nt, Human
ucacgaggucaggagauc

SEQ ID NO: 1382264 - RNA, 24 nt, Human
ucacgaggucaggagaucgagacc

SEQ ID NO: 1382265 - RNA, 22 nt, Human
uccagccuggcgacagagugag

SEQ ID NO: 1382266 - RNA, 23 nt, Human
uccagccuggcgacagagugaga

SEQ ID NO: 1382267 - RNA, 18 nt, Human
ucccucgcaugugcaguu

SEQ ID NO: 1382268 - RNA, 23 nt, Human
ucccucgcaugugcaguucacaa

SEQ ID NO: 1382269 - RNA, 19 nt, Human
uccuuuagcaacgaugaug

SEQ ID NO: 1382270 - RNA, 25 nt, Human
ucucuacuaaaaauacaaaaaaaau

SEQ ID NO: 1382271 - RNA, 19 nt, Human
ucugcagggccggcgggga

SEQ ID NO: 1382272 - RNA, 23 nt, Human
ucugucucaaaaaaaaaaaaaaa

SEQ ID NO: 1382273 - RNA, 24 nt, Human
ucuguggccaggcgcacagagaac

SEQ ID NO: 1382274 - RNA, 20 nt, Human
ucuguggccugggggugggg

SEQ ID NO: 1382275 - RNA, 21 nt, Human
ucuucugugcagccucccaug

SEQ ID NO: 1382276 - RNA, 22 nt, Human
ugaaacauaaaggauuaaacaa

SEQ ID NO: 1382277 - RNA, 22 nt, Human
ugagccgagauugugccaacgc

SEQ ID NO: 1382278 - RNA, 19 nt, Human
ugaggcaaggcggccagcu

SEQ ID NO: 1382279 - RNA, 20 nt, Human
ugaggcaggagaaucgauug

SEQ ID NO: 1382280 - RNA, 24 nt, Human
ugaggcaggagaaucgauugaacc

SEQ ID NO: 1382281 - RNA, 25 nt, Human
ugaggcaggagaaucgauugaaccc

SEQ ID NO: 1382282 - RNA, 24 nt, Human
ugaggcgggcagaucacgagguca

SEQ ID NO: 1382283 - RNA, 22 nt, Human
uggcacacaccuguagucccag

SEQ ID NO: 1382284 - RNA, 24 nt, Human
uggccaacauggugaaacccuguc

SEQ ID NO: 1382285 - RNA, 21 nt, Human
uggccuggggguggggacccc

SEQ ID NO: 1382286 - RNA, 24 nt, Human
uggcucaagccuguaaucccagca

SEQ ID NO: 1382287 - RNA, 19 nt, Human
uggcugggcgugguggcac

SEQ ID NO: 1382288 - RNA, 19 nt, Human
ugggaggcugaggcgggca

SEQ ID NO: 1382289 - RNA, 20 nt, Human
ugggaggcugaggcgggcag

SEQ ID NO: 1382290 - RNA, 24 nt, Human
ugggaggcugaggcgggcagauca

SEQ ID NO: 1382291 - RNA, 22 nt, Human
uggucuguggccuggggguggg

SEQ ID NO: 1382292 - RNA, 23 nt, Human
uggucuguggccugggggugggg

SEQ ID NO: 1382293 - RNA, 23 nt, Human
ugguggcacacaccuguaguccc

SEQ ID NO: 1382294 - RNA, 24 nt, Human
ugguggcacacaccuguaguccca

SEQ ID NO: 1382295 - RNA, 20 nt, Human
uguaguguccucaaauggau

SEQ ID NO: 1382296 - RNA, 21 nt, Human
uguaguguccucaaauggaug

SEQ ID NO: 1382297 - RNA, 20 nt, Human
uguaucgaacaugcagcugc

SEQ ID NO: 1382298 - RNA, 18 nt, Human
ugucuguggccaggcgca

SEQ ID NO: 1382299 - RNA, 20 nt, Human
ugugcaaaauugcuuguagu

SEQ ID NO: 1382300 - RNA, 21 nt, Human
uuaacauaaagaaaacacaau

SEQ ID NO: 1382301 - RNA, 19 nt, Human
uucagaauaucuaccucua

SEQ ID NO: 1382302 - RNA, 24 nt, Human
uugaacccaggaggcggagguugc

SEQ ID NO: 1382303 - RNA, 18 nt, Human
uugcagugagccgagauu

SEQ ID NO: 1382304 - RNA, 22 nt, Human
uugcagugagccgagauugugc

SEQ ID NO: 1382305 - RNA, 25 nt, Human
uugggaggcugaggcgggcagauca

SEQ ID NO: 1382306 - RNA, 22 nt, Human
accgacgcuggcggagguugcg

SEQ ID NO: 1382307 - RNA, 23 nt, Human
agaggagggaguaaguuguuggg

SEQ ID NO: 1382308 - RNA, 18 nt, Human
agguucuuuauucucccu

SEQ ID NO: 1382309 - RNA, 26 nt, Human
caccaguaacacuuccaggcucccaa

SEQ ID NO: 1382310 - RNA, 21 nt, Human
cacccacaccugcccagggac

SEQ ID NO: 1382311 - RNA, 22 nt, Human
cacccacaccugcccagggacc

SEQ ID NO: 1382312 - RNA, 19 nt, Human
cagcuuccuaaaugucuca

SEQ ID NO: 1382313 - RNA, 22 nt, Human
caucacagaacuucuuccuaga

SEQ ID NO: 1382314 - RNA, 27 nt, Human
caucacagaacuucuuccuagaugggg

SEQ ID NO: 1382315 - RNA, 18 nt, Human
cauuccacccacaccugc

SEQ ID NO: 1382316 - RNA, 18 nt, Human
ccauugggugaacugcuu

SEQ ID NO: 1382317 - RNA, 22 nt, Human
ccuaaaugucucacuccauccc

SEQ ID NO: 1382318 - RNA, 23 nt, Human
ccuucugcuacacugugguaguc

SEQ ID NO: 1382319 - RNA, 20 nt, Human
cgacacacagcagaguucca

SEQ ID NO: 1382320 - RNA, 18 nt, Human
cuugucugcuccaugccc

SEQ ID NO: 1382321 - RNA, 20 nt, Human
gcucccaaaacgacacacag

SEQ ID NO: 1382322 - RNA, 21 nt, Human
guaacacuuccaggcucccaa

SEQ ID NO: 1382323 - RNA, 19 nt, Human
guggauuugguuaccccga

SEQ ID NO: 1382324 - RNA, 22 nt, Human
uccacccacaccugcccaggga

SEQ ID NO: 1382325 - RNA, 24 nt, Human
uccacccacaccugcccagggacc

SEQ ID NO: 1382326 - RNA, 19 nt, Human
ugauauauaggcuacuggg

SEQ ID NO: 1382327 - RNA, 20 nt, Human
ugcccagggaccgacgcugg

SEQ ID NO: 1382328 - RNA, 20 nt, Human
ugcuugucugcuccaugccc

SEQ ID NO: 1382329 - RNA, 20 nt, Human
uggcggagguugcggacagc

SEQ ID NO: 1382330 - RNA, 26 nt, Human
ugguggauuugguuaccccgagguuc

SEQ ID NO: 1382331 - RNA, 23 nt, Human
ugucucacuccaucccugucuau

SEQ ID NO: 1382332 - RNA, 19 nt, Human
uucacacaucacagaacuu

SEQ ID NO: 1382333 - RNA, 19 nt, Human
uuuuuuuuuuuuuuuguuu

SEQ ID NO: 1382334 - RNA, 22 nt, Human
aaaccccgucuccaccaaaaaa

SEQ ID NO: 1382335 - RNA, 20 nt, Human
aacacagcgaaaccccgucu

SEQ ID NO: 1382336 - RNA, 21 nt, Human
aacacagcgaaaccccgucuc

SEQ ID NO: 1382337 - RNA, 25 nt, Human
aauaaauauagaaaauuacauacaa

SEQ ID NO: 1382338 - RNA, 23 nt, Human
aaucaggcagggaggcugcagug

SEQ ID NO: 1382339 - RNA, 24 nt, Human
aaucgcuugaacccgggaggcgga

SEQ ID NO: 1382340 - RNA, 19 nt, Human
aaugaaggaggcugagaga

SEQ ID NO: 1382341 - RNA, 19 nt, Human
acagcgaaaccccgucucc

SEQ ID NO: 1382342 - RNA, 26 nt, Human
acaggucugacaucuguggucccaug

SEQ ID NO: 1382343 - RNA, 18 nt, Human
acugcacuccagccuggg

SEQ ID NO: 1382344 - RNA, 20 nt, Human
agaacuuugggaggcugagg

SEQ ID NO: 1382345 - RNA, 23 nt, Human
agccgggcgugguggcacaugcc

SEQ ID NO: 1382346 - RNA, 24 nt, Human
agccuggccaacacagcgaaaccc

SEQ ID NO: 1382347 - RNA, 26 nt, Human
agcugggacuuucuggaagagguuuu

SEQ ID NO: 1382348 - RNA, 25 nt, Human
agcugggagguggagguuggggacc

SEQ ID NO: 1382349 - RNA, 22 nt, Human
aggcagaggcugcaaucucggc

SEQ ID NO: 1382350 - RNA, 22 nt, Human
aggcagcagaaucgcuugaacc

SEQ ID NO: 1382351 - RNA, 24 nt, Human
aggcagcagaaucgcuugaacccg

SEQ ID NO: 1382352 - RNA, 22 nt, Human
aggcagcugggagguggagguu

SEQ ID NO: 1382353 - RNA, 18 nt, Human
aggcaugcggaucaccug

SEQ ID NO: 1382354 - RNA, 22 nt, Human
aggcaugcggaucaccugaggg

SEQ ID NO: 1382355 - RNA, 22 nt, Human
aggcaugcggaucaccugaggu

SEQ ID NO: 1382356 - RNA, 21 nt, Human
aggcggagguugcggugagcc

SEQ ID NO: 1382357 - RNA, 24 nt, Human
aggcggagguugcggugagccgag

SEQ ID NO: 1382358 - RNA, 24 nt, Human
aggcugaggcagcagaaucgcuug

SEQ ID NO: 1382359 - RNA, 20 nt, Human
aggcugaggcaggagaauca

SEQ ID NO: 1382360 - RNA, 21 nt, Human
agggagagggagaaccuaaau

SEQ ID NO: 1382361 - RNA, 19 nt, Human
agggaggcugcagugagcc

SEQ ID NO: 1382362 - RNA, 21 nt, Human
agggaggcugcagugagccga

SEQ ID NO: 1382363 - RNA, 22 nt, Human
agggaggcugcagugagccgag

SEQ ID NO: 1382364 - RNA, 21 nt, Human
agguggagguuguagcgagcc

SEQ ID NO: 1382365 - RNA, 24 nt, Human
agguggagguuguagcgagccgag

SEQ ID NO: 1382366 - RNA, 19 nt, Human
agucaggcguggcggcgcg

SEQ ID NO: 1382367 - RNA, 22 nt, Human
aucaaguugguuuuuccauugu

SEQ ID NO: 1382368 - RNA, 24 nt, Human
aucaugccacugcacuccagccug

SEQ ID NO: 1382369 - RNA, 22 nt, Human
auccuggcaccucgggaggcca

SEQ ID NO: 1382370 - RNA, 22 nt, Human
augccacugcacuccagccugg

SEQ ID NO: 1382371 - RNA, 19 nt, Human
augccuguaaucccagaac

SEQ ID NO: 1382372 - RNA, 18 nt, Human
auguggcagaaaugggga

SEQ ID NO: 1382373 - RNA, 23 nt, Human
auugugccguugcacuccagccu

SEQ ID NO: 1382374 - RNA, 21 nt, Human
cacacaagauuuauuggggaa

SEQ ID NO: 1382375 - RNA, 18 nt, Human
cacugcacuccagccugg

SEQ ID NO: 1382376 - RNA, 19 nt, Human
cacugcacuccagccuggg

SEQ ID NO: 1382377 - RNA, 21 nt, Human
cacugcacuccagccugggca

SEQ ID NO: 1382378 - RNA, 24 nt, Human
cacugcacuccagccugggcacca

SEQ ID NO: 1382379 - RNA, 20 nt, Human
cacugggcaggcugaggcag

SEQ ID NO: 1382380 - RNA, 24 nt, Human
cacuuuggggggccaaggcaggca

SEQ ID NO: 1382381 - RNA, 18 nt, Human
cagaacuuugggaggcug

SEQ ID NO: 1382382 - RNA, 20 nt, Human
cagaacuuugggaggcugag

SEQ ID NO: 1382383 - RNA, 22 nt, Human
cagacgaugggcggccuggcag

SEQ ID NO: 1382384 - RNA, 21 nt, Human
cagagacgcuccucacuuccc

SEQ ID NO: 1382385 - RNA, 21 nt, Human
cagagacgcuccucacuuucc

SEQ ID NO: 1382386 - RNA, 21 nt, Human
cagcaguacaguccagcuucg

SEQ ID NO: 1382387 - RNA, 24 nt, Human
cagccugaccaauauggagaaacc

SEQ ID NO: 1382388 - RNA, 24 nt, Human
cagcuacucaggaggcugaggcag

SEQ ID NO: 1382389 - RNA, 20 nt, Human
caggaggcugaggcagcaga

SEQ ID NO: 1382390 - RNA, 23 nt, Human
caucagaccacauacaggucuga

SEQ ID NO: 1382391 - RNA, 24 nt, Human
caugccuguaaucccagaacuuug

SEQ ID NO: 1382392 - RNA, 24 nt, Human
caugcggaucaccugagguuggga

SEQ ID NO: 1382393 - RNA, 20 nt, Human
ccacugcacuccagccuggg

SEQ ID NO: 1382394 - RNA, 20 nt, Human
ccacugcacuccagccuggg

SEQ ID NO: 1382395 - RNA, 21 nt, Human
ccacugcacuccagccugggc

SEQ ID NO: 1382396 - RNA, 22 nt, Human
ccacugcacuccagccugggca

SEQ ID NO: 1382397 - RNA, 22 nt, Human
ccacugcacuccagccugggca

SEQ ID NO: 1382398 - RNA, 18 nt, Human
ccucacuuuccagacugg

SEQ ID NO: 1382399 - RNA, 19 nt, Human
ccucgggaggccaaggcug

SEQ ID NO: 1382400 - RNA, 22 nt, Human
ccugaccaauauggagaaaccc

SEQ ID NO: 1382401 - RNA, 22 nt, Human
ccugagguugggaguucgagac

SEQ ID NO: 1382402 - RNA, 22 nt, Human
ccugcaaucgcaggcacugggc

SEQ ID NO: 1382403 - RNA, 23 nt, Human
ccuggccaacacagcgaaacccc

SEQ ID NO: 1382404 - RNA, 24 nt, Human
ccuggccaacacagcgaaaccccg

SEQ ID NO: 1382405 - RNA, 21 nt, Human
ccuguaaucccagcuacucag

SEQ ID NO: 1382406 - RNA, 22 nt, Human
cgagauggcagcaguacagucc

SEQ ID NO: 1382407 - RNA, 24 nt, Human
cgagauugugccguugcacuccag

SEQ ID NO: 1382408 - RNA, 23 nt, Human
cgagccgagaucaugccacugca

SEQ ID NO: 1382409 - RNA, 18 nt, Human
cgcgguuaggagcuggag

SEQ ID NO: 1382410 - RNA, 24 nt, Human
cggaucaccugagguugggaguuc

SEQ ID NO: 1382411 - RNA, 25 nt, Human
cggcacuuuggggggccaaggcagg

SEQ ID NO: 1382412 - RNA, 24 nt, Human
cgggaggcggagguugcggugagc

SEQ ID NO: 1382413 - RNA, 24 nt, Human
cucaugccuguaaucccagaacuu

SEQ ID NO: 1382414 - RNA, 20 nt, Human
cugcagugagccgagauggc

SEQ ID NO: 1382415 - RNA, 18 nt, Human
cuggccaacacagcgaaa

SEQ ID NO: 1382416 - RNA, 21 nt, Human
cugggcaccauugagcacuga

SEQ ID NO: 1382417 - RNA, 19 nt, Human
gaccguggggagagggaga

SEQ ID NO: 1382418 - RNA, 23 nt, Human
gacuccgucugccauccuggcac

SEQ ID NO: 1382419 - RNA, 20 nt, Human
gagaaccaggguggagcugg

SEQ ID NO: 1382420 - RNA, 23 nt, Human
gagaccagccugaccaauaugga

SEQ ID NO: 1382421 - RNA, 19 nt, Human
gagagaaccaggguggagc

SEQ ID NO: 1382422 - RNA, 23 nt, Human
gagaucaugccacugcacuccag

SEQ ID NO: 1382423 - RNA, 21 nt, Human
gagguugcggugagccgagau

SEQ ID NO: 1382424 - RNA, 23 nt, Human
gagguugcggugagccgagauug

SEQ ID NO: 1382425 - RNA, 24 nt, Human
gaucaccugagguugggaguucga

SEQ ID NO: 1382426 - RNA, 22 nt, Human
gcacuuuggggggccaaggcag

SEQ ID NO: 1382427 - RNA, 21 nt, Human
gcagcaguacaguccagcuuc

SEQ ID NO: 1382428 - RNA, 21 nt, Human
gcagcugggagguggagguug

SEQ ID NO: 1382429 - RNA, 22 nt, Human
gccacugcacuccagccugggc

SEQ ID NO: 1382430 - RNA, 18 nt, Human
ggaggcugcagugagccg

SEQ ID NO: 1382431 - RNA, 22 nt, Human
ggaggcugcagugagccgagau

SEQ ID NO: 1382432 - RNA, 24 nt, Human
ggaggcugcagugagccgagaugg

SEQ ID NO: 1382433 - RNA, 22 nt, Human
ggagguugcggugagccgagau

SEQ ID NO: 1382434 - RNA, 24 nt, Human
ggagguugcggugagccgagauug

SEQ ID NO: 1382435 - RNA, 23 nt, Human
ggagguuguagcgagccgagauc

SEQ ID NO: 1382436 - RNA, 24 nt, Human
ggagguuguagcgagccgagauca

SEQ ID NO: 1382437 - RNA, 23 nt, Human
ggaucaccugagguugggaguuc

SEQ ID NO: 1382438 - RNA, 21 nt, Human
ggcacaugccuguaaucccag

SEQ ID NO: 1382439 - RNA, 21 nt, Human
ggccgggugcgguggcucaug

SEQ ID NO: 1382440 - RNA, 23 nt, Human
ggcgugguggcacaugccuguaa

SEQ ID NO: 1382441 - RNA, 21 nt, Human
ggcugcaaucucggcacuuug

SEQ ID NO: 1382442 - RNA, 23 nt, Human
gggaggccaaggcuggcggauca

SEQ ID NO: 1382443 - RNA, 22 nt, Human
gggcagagacgcuccucacuuu

SEQ ID NO: 1382444 - RNA, 22 nt, Human
gggccaaggcaggcagcuggga

SEQ ID NO: 1382445 - RNA, 24 nt, Human
gggugcgguggcucaugccuguaa

SEQ ID NO: 1382446 - RNA, 24 nt, Human
gguggcacaugccuguaaucccag

SEQ ID NO: 1382447 - RNA, 23 nt, Human
gguggcucaugccuguaauccca

SEQ ID NO: 1382448 - RNA, 24 nt, Human
gguggcucaugccuguaaucccag

SEQ ID NO: 1382449 - RNA, 24 nt, Human
guugcggugagccgagauugugcc

SEQ ID NO: 1382450 - RNA, 23 nt, Human
uaaaaauacaaaauuagccgggc

SEQ ID NO: 1382451 - RNA, 18 nt, Human
uagaaaauuacauacaaa

SEQ ID NO: 1382452 - RNA, 22 nt, Human
uagccgggcgugguggcacaug

SEQ ID NO: 1382453 - RNA, 18 nt, Human
ucaccugagguugggagu

SEQ ID NO: 1382454 - RNA, 23 nt, Human
ucagaccacauacaggucugaca

SEQ ID NO: 1382455 - RNA, 23 nt, Human
ucaugccacugcacuccagccug

SEQ ID NO: 1382456 - RNA, 22 nt, Human
ucaugccuguaaucccagaacu

SEQ ID NO: 1382457 - RNA, 21 nt, Human
uccaccaaaaaaauacgaaaa

SEQ ID NO: 1382458 - RNA, 24 nt, Human
ucgcuugaacccgggaggcggagg

SEQ ID NO: 1382459 - RNA, 22 nt, Human
ugagccgagauugugccguugc

SEQ ID NO: 1382460 - RNA, 24 nt, Human
ugaggcagcagaaucgcuugaacc

SEQ ID NO: 1382461 - RNA, 25 nt, Human
ugaggcagcagaaucgcuugaaccc

SEQ ID NO: 1382462 - RNA, 19 nt, Human
ugaggcaggagaaucaggc

SEQ ID NO: 1382463 - RNA, 20 nt, Human
ugaggcaugcggaucaccug

SEQ ID NO: 1382464 - RNA, 21 nt, Human
ugaggcaugcggaucaccuga

SEQ ID NO: 1382465 - RNA, 24 nt, Human
ugaggcaugcggaucaccugaggu

SEQ ID NO: 1382466 - RNA, 23 nt, Human
ugccuguaaucccagaacuuugg

SEQ ID NO: 1382467 - RNA, 23 nt, Human
ugccuguaaucccagaacuuugg

SEQ ID NO: 1382468 - RNA, 24 nt, Human
ugccuguaaucccagaacuuuggg

SEQ ID NO: 1382469 - RNA, 24 nt, Human
ugccuguaaucccagcuacucagg

SEQ ID NO: 1382470 - RNA, 18 nt, Human
uggaagagguuuugggug

SEQ ID NO: 1382471 - RNA, 18 nt, Human
uggaggagagaaccaggg

SEQ ID NO: 1382472 - RNA, 21 nt, Human
uggcacaugccuguaauccca

SEQ ID NO: 1382473 - RNA, 22 nt, Human
uggcacaugccuguaaucccag

SEQ ID NO: 1382474 - RNA, 24 nt, Human
uggcagagacgcuccucacuuccu

SEQ ID NO: 1382475 - RNA, 24 nt, Human
uggccgggugcgguggcucaugcc

SEQ ID NO: 1382476 - RNA, 21 nt, Human
uggcucaugccuguaauccca

SEQ ID NO: 1382477 - RNA, 22 nt, Human
uggcucaugccuguaaucccag

SEQ ID NO: 1382478 - RNA, 24 nt, Human
ugggaggcugaggcaugcggauca

SEQ ID NO: 1382479 - RNA, 24 nt, Human
ugggagguggagguuguagcgagc

SEQ ID NO: 1382480 - RNA, 23 nt, Human
uggggagagggagagggagaggg

SEQ ID NO: 1382481 - RNA, 24 nt, Human
ugguggcacaugccuguaauccca

SEQ ID NO: 1382482 - RNA, 18 nt, Human
uuagccgggcgugguggc

SEQ ID NO: 1382483 - RNA, 20 nt, Human
uuagccgggcgugguggcac

SEQ ID NO: 1382484 - RNA, 24 nt, Human
uuagccgggcgugguggcacaugc

SEQ ID NO: 1382485 - RNA, 20 nt, Human
uuaggagcuggagaccagcc

SEQ ID NO: 1382486 - RNA, 26 nt, Human
uucaauaaauauagaaaauuacauac

SEQ ID NO: 1382487 - RNA, 21 nt, Human
uuccacagagcaguuguuucc

SEQ ID NO: 1382488 - RNA, 24 nt, Human
uugaacccgggaggcggagguugc

SEQ ID NO: 1382489 - RNA, 22 nt, Human
uugcggugagccgagauugugc

SEQ ID NO: 1382490 - RNA, 25 nt, Human
uugggaggcugaggcaugcggauca

SEQ ID NO: 1382491 - RNA, 20 nt, Human
uuguagcgagccgagaucau

SEQ ID NO: 1382492 - RNA, 20 nt, Human
uuuggggggccaaggcaggc

SEQ ID NO: 1382493 - RNA, 18 nt, Human
aaaacccugucaccugcu

SEQ ID NO: 1382494 - RNA, 19 nt, Human
aacacagaaaacagggcca

SEQ ID NO: 1382495 - RNA, 21 nt, Human
aagaacaaacucaauagcacc

SEQ ID NO: 1382496 - RNA, 20 nt, Human
aauccagccacccuguccaa

SEQ ID NO: 1382497 - RNA, 18 nt, Human
accugcuuuauuucugga

SEQ ID NO: 1382498 - RNA, 24 nt, Human
agcaagaucaacaauuuucacugg

SEQ ID NO: 1382499 - RNA, 18 nt, Human
auccagccacccugucca

SEQ ID NO: 1382500 - RNA, 22 nt, Human
caagaucaacaauuuucacugg

SEQ ID NO: 1382501 - RNA, 21 nt, Human
cacccuguccaaacuggaauc

SEQ ID NO: 1382502 - RNA, 25 nt, Human
cagaaaacagggccacuccuuuuaa

SEQ ID NO: 1382503 - RNA, 23 nt, Human
ccccaagggaugggaagcaguaa

SEQ ID NO: 1382504 - RNA, 22 nt, Human
ccuccccuaacaggagcccuag

SEQ ID NO: 1382505 - RNA, 23 nt, Human
gacuacacucgaggcugccccca

SEQ ID NO: 1382506 - RNA, 19 nt, Human
gcccccaagggaugggaag

SEQ ID NO: 1382507 - RNA, 18 nt, Human
ggaaaauauucacuugaa

SEQ ID NO: 1382508 - RNA, 21 nt, Human
gggaaugcugaaacuuccuug

SEQ ID NO: 1382509 - RNA, 18 nt, Human
guaaagggagaagggaaa

SEQ ID NO: 1382510 - RNA, 24 nt, Human
uaaagaacaaacucaauagcacca

SEQ ID NO: 1382511 - RNA, 19 nt, Human
uccaaacuggaaucugauu

SEQ ID NO: 1382512 - RNA, 19 nt, Human
ugauucaacauuucucccu

SEQ ID NO: 1382513 - RNA, 19 nt, Human
ugggguuuuaacacagaaa

SEQ ID NO: 1382514 - RNA, 19 nt, Human
uguccaaacuggaaucuga

SEQ ID NO: 1382515 - RNA, 19 nt, Human
uguuuucccucuugauuca

SEQ ID NO: 1382516 - RNA, 27 nt, Human
uucaacauuucucccuccccuaacagg

SEQ ID NO: 1382517 - RNA, 29 nt, Human
uucaacauuucucccuccccuaacaggag

SEQ ID NO: 1382518 - RNA, 19 nt, Human
uugaauuugaggggcagcu

SEQ ID NO: 1382519 - RNA, 24 nt, Human
uuuaacacagaaaacagggccacu

SEQ ID NO: 1382520 - RNA, 19 nt, Human
uuuuuuuuuuuuuuuuuaa

SEQ ID NO: 1382521 - RNA, 18 nt, Human
aaaaaugugcuauguccc

SEQ ID NO: 1382522 - RNA, 21 nt, Human
aaacagggcccaacccuggug

SEQ ID NO: 1382523 - RNA, 21 nt, Human
aagagcccgcugcccgugcca

SEQ ID NO: 1382524 - RNA, 22 nt, Human
aagcagccucacaaagacagac

SEQ ID NO: 1382525 - RNA, 25 nt, Human
aagcucgcagccaucaguggcuuaa

SEQ ID NO: 1382526 - RNA, 21 nt, Human
aaggagcuugccccaagaggc

SEQ ID NO: 1382527 - RNA, 20 nt, Human
acagacaaaaaugugcuaug

SEQ ID NO: 1382528 - RNA, 18 nt, Human
accaaggugucaugagug

SEQ ID NO: 1382529 - RNA, 21 nt, Human
acccucuccaagacaauguug

SEQ ID NO: 1382530 - RNA, 19 nt, Human
acccuggccucgacaaucu

SEQ ID NO: 1382531 - RNA, 19 nt, Human
accuauuuccauucuccuc

SEQ ID NO: 1382532 - RNA, 18 nt, Human
acuucccugggcuugggc

SEQ ID NO: 1382533 - RNA, 25 nt, Human
agagcaaagaggcucaggaagcagg

SEQ ID NO: 1382534 - RNA, 22 nt, Human
agagguaugagagggugaacca

SEQ ID NO: 1382535 - RNA, 26 nt, Human
agcaaaaaucccuucacuucugugga

SEQ ID NO: 1382536 - RNA, 20 nt, Human
agcuugcaugggcccugcug

SEQ ID NO: 1382537 - RNA, 18 nt, Human
aggaagcaggacuguuuc

SEQ ID NO: 1382538 - RNA, 18 nt, Human
aggaaugcuaggagaugg

SEQ ID NO: 1382539 - RNA, 20 nt, Human
aggaggcagcuguggugaga

SEQ ID NO: 1382540 - RNA, 21 nt, Human
aggcaaggugggaggcagcug

SEQ ID NO: 1382541 - RNA, 22 nt, Human
agggcccaacccugguggccuu

SEQ ID NO: 1382542 - RNA, 18 nt, Human
aggugucaugagugggga

SEQ ID NO: 1382543 - RNA, 23 nt, Human
aguaacaaacaccaaucagcuau

SEQ ID NO: 1382544 - RNA, 21 nt, Human
augcaaccgcaaccaugggcu

SEQ ID NO: 1382545 - RNA, 20 nt, Human
caaagcaagagacaccauuc

SEQ ID NO: 1382546 - RNA, 19 nt, Human
caaagcagccucacaaaga

SEQ ID NO: 1382547 - RNA, 20 nt, Human
caaagcagccucacaaagac

SEQ ID NO: 1382548 - RNA, 23 nt, Human
caaaggaggcagcuguggugaga

SEQ ID NO: 1382549 - RNA, 23 nt, Human
caaggaggaacugaaugggagac

SEQ ID NO: 1382550 - RNA, 24 nt, Human
caaggugggaggcagcuguccccu

SEQ ID NO: 1382551 - RNA, 24 nt, Human
caaguucaagcccuaaccuuaccu

SEQ ID NO: 1382552 - RNA, 24 nt, Human
caccacgcagagcucaagcaggau

SEQ ID NO: 1382553 - RNA, 20 nt, Human
caccaucacccaggcaaggu

SEQ ID NO: 1382554 - RNA, 21 nt, Human
cacccaggcaaggugggaggc

SEQ ID NO: 1382555 - RNA, 23 nt, Human
cacccuguggccaugggcagaau

SEQ ID NO: 1382556 - RNA, 22 nt, Human
cacuggucugacucugcccggc

SEQ ID NO: 1382557 - RNA, 19 nt, Human
cagaaggacagaucuuaau

SEQ ID NO: 1382558 - RNA, 20 nt, Human
cagagcucaagcaggauccu

SEQ ID NO: 1382559 - RNA, 19 nt, Human
cagcagcuucaggugaggc

SEQ ID NO: 1382560 - RNA, 23 nt, Human
cagccucacaaagacagacaaaa

SEQ ID NO: 1382561 - RNA, 20 nt, Human
cagcuaugugaucuugagca

SEQ ID NO: 1382562 - RNA, 26 nt, Human
caggauccuuugccaacuaacggugu

SEQ ID NO: 1382563 - RNA, 19 nt, Human
caugggcccugcugccucu

SEQ ID NO: 1382564 - RNA, 19 nt, Human
cccaggcaaggugggaggc

SEQ ID NO: 1382565 - RNA, 23 nt, Human
ccccaagaggcagagcaaagagg

SEQ ID NO: 1382566 - RNA, 20 nt, Human
ccccagccgacggaaagccc

SEQ ID NO: 1382567 - RNA, 24 nt, Human
cccgugccauugcuugggcaaagu

SEQ ID NO: 1382568 - RNA, 20 nt, Human
cccuaagacuuggcccugcu

SEQ ID NO: 1382569 - RNA, 18 nt, Human
cccucagaaucccucucu

SEQ ID NO: 1382570 - RNA, 21 nt, Human
cccugucuagguuaaggaaug

SEQ ID NO: 1382571 - RNA, 19 nt, Human
cccuguggccaugggcaga

SEQ ID NO: 1382572 - RNA, 20 nt, Human
ccgauggcaguguacuuccc

SEQ ID NO: 1382573 - RNA, 23 nt, Human
ccgauggcaguguacuucccgaa

SEQ ID NO: 1382574 - RNA, 22 nt, Human
ccgcugcccgugccauugcuug

SEQ ID NO: 1382575 - RNA, 21 nt, Human
ccggccucccaggaaccugcu

SEQ ID NO: 1382576 - RNA, 25 nt, Human
ccuaaccuuaccuuaguuuaccagc

SEQ ID NO: 1382577 - RNA, 24 nt, Human
ccuguggccaugggcagaauggac

SEQ ID NO: 1382578 - RNA, 22 nt, Human
cgugccauugcuugggcaaagu

SEQ ID NO: 1382579 - RNA, 23 nt, Human
cucagaaucccucucuucaagcu

SEQ ID NO: 1382580 - RNA, 23 nt, Human
cucccaggaaccugcuggccacu

SEQ ID NO: 1382581 - RNA, 18 nt, Human
cucugucccgcccagccu

SEQ ID NO: 1382582 - RNA, 21 nt, Human
cuggccacugagaagggauuc

SEQ ID NO: 1382583 - RNA, 18 nt, Human
cuguugaacuccagccca

SEQ ID NO: 1382584 - RNA, 20 nt, Human
cuguuugugaugcccuaaga

SEQ ID NO: 1382585 - RNA, 22 nt, Human
cuucccgaacccuggccucgac

SEQ ID NO: 1382586 - RNA, 19 nt, Human
gaacacugacuggacaagg

SEQ ID NO: 1382587 - RNA, 21 nt, Human
gaacccuggccucgacaaucc

SEQ ID NO: 1382588 - RNA, 25 nt, Human
gacacuguuugguggacgcuugugg

SEQ ID NO: 1382589 - RNA, 21 nt, Human
gacuaacccucuccaagacaa

SEQ ID NO: 1382590 - RNA, 20 nt, Human
gagacagaggcauaaaaaua

SEQ ID NO: 1382591 - RNA, 22 nt, Human
gagcaaagaggcucaggaagca

SEQ ID NO: 1382592 - RNA, 24 nt, Human
gagcggugccuugugccggccucc

SEQ ID NO: 1382593 - RNA, 18 nt, Human
gaggaacagcagcuucag

SEQ ID NO: 1382594 - RNA, 22 nt, Human
gagguauucaaggaggaacuga

SEQ ID NO: 1382595 - RNA, 21 nt, Human
gcaugggcccugcugccucuc

SEQ ID NO: 1382596 - RNA, 21 nt, Human
gccacaccgugguucuugacu

SEQ ID NO: 1382597 - RNA, 23 nt, Human
gcccugcugccucucugcacccu

SEQ ID NO: 1382598 - RNA, 18 nt, Human
gccggccucccaggaacc

SEQ ID NO: 1382599 - RNA, 25 nt, Human
gccucucuauuuuuccuuuuuaaaa

SEQ ID NO: 1382600 - RNA, 25 nt, Human
ggaaagaaaggacacuucccugggc

SEQ ID NO: 1382601 - RNA, 20 nt, Human
ggacagccacaaagucuggc

SEQ ID NO: 1382602 - RNA, 25 nt, Human
ggacuaacccucuccaagacaaugu

SEQ ID NO: 1382603 - RNA, 19 nt, Human
gggcuuuuguguguuuggc

SEQ ID NO: 1382604 - RNA, 22 nt, Human
ggguggcagcuugcaugggccc

SEQ ID NO: 1382605 - RNA, 18 nt, Human
ggugccuugugccggccu

SEQ ID NO: 1382606 - RNA, 18 nt, Human
guggccuuucccacuccu

SEQ ID NO: 1382607 - RNA, 20 nt, Human
guggccuuucccacuccucu

SEQ ID NO: 1382608 - RNA, 24 nt, Human
guuaaggaaugcuaggagaugguc

SEQ ID NO: 1382609 - RNA, 19 nt, Human
guucacaguaacaaacacc

SEQ ID NO: 1382610 - RNA, 20 nt, Human
uaaaaucagggcccuccucc

SEQ ID NO: 1382611 - RNA, 20 nt, Human
uacagcacacugaaggcccg

SEQ ID NO: 1382612 - RNA, 18 nt, Human
uaccucuguuucaaagga

SEQ ID NO: 1382613 - RNA, 21 nt, Human
uaggaggaacagcagcuucag

SEQ ID NO: 1382614 - RNA, 24 nt, Human
ucacaguaacaaacaccaagguac

SEQ ID NO: 1382615 - RNA, 23 nt, Human
ucacugaagucuuuacaucuguu

SEQ ID NO: 1382616 - RNA, 20 nt, Human
ucauuguuuugaggccucuc

SEQ ID NO: 1382617 - RNA, 21 nt, Human
ucccacuccuucagcucagau

SEQ ID NO: 1382618 - RNA, 21 nt, Human
ucccagggccuuggucuccuc

SEQ ID NO: 1382619 - RNA, 24 nt, Human
ucccgcccagccuuggugaccaga

SEQ ID NO: 1382620 - RNA, 21 nt, Human
uccucauccacacagagcccu

SEQ ID NO: 1382621 - RNA, 24 nt, Human
uccuccaugcuacuccuuggccac

SEQ ID NO: 1382622 - RNA, 19 nt, Human
ucucccucagaaucccucu

SEQ ID NO: 1382623 - RNA, 21 nt, Human
ucugcaccaaggugucaugag

SEQ ID NO: 1382624 - RNA, 19 nt, Human
ugaaagaacacugacugga

SEQ ID NO: 1382625 - RNA, 21 nt, Human
ugaaagaacacugacuggaca

SEQ ID NO: 1382626 - RNA, 28 nt, Human
ugaccagauggaccaagcucucccucag

SEQ ID NO: 1382627 - RNA, 20 nt, Human
ugaggccucucuauuuuucc

SEQ ID NO: 1382628 - RNA, 18 nt, Human
ugccucccagggccuugg

SEQ ID NO: 1382629 - RNA, 21 nt, Human
uggacgcuuguggcucuccug

SEQ ID NO: 1382630 - RNA, 20 nt, Human
uggaugguucuccuuucucu

SEQ ID NO: 1382631 - RNA, 24 nt, Human
uggcccagaucugcccuuaauugc

SEQ ID NO: 1382632 - RNA, 19 nt, Human
ugggcaggaggucacucug

SEQ ID NO: 1382633 - RNA, 18 nt, Human
ugugggggaugugggaga

SEQ ID NO: 1382634 - RNA, 22 nt, Human
uucuccuuucucucugauccuu

SEQ ID NO: 1382635 - RNA, 22 nt, Human
uugaggccucucuauuuuuccu

SEQ ID NO: 1382636 - RNA, 24 nt, Human
uuggcccugcuccagcacagggcg

SEQ ID NO: 1382637 - RNA, 18 nt, Human
uuuccuuuuuaaaaucag

SEQ ID NO: 1382638 - RNA, 24 nt, Human
uuugguggacgcuuguggcucucc

SEQ ID NO: 1382639 - RNA, 18 nt, Human
agagagaaggcacgaggc

SEQ ID NO: 1382640 - RNA, 23 nt, Human
cacccccaccccagccccaggga

SEQ ID NO: 1382641 - RNA, 19 nt, Human
cagcgacgcccccgcccgc

SEQ ID NO: 1382642 - RNA, 23 nt, Human
caggcuaggccaagagagaaggc

SEQ ID NO: 1382643 - RNA, 22 nt, Human
cagggcagaggccaggccugcc

SEQ ID NO: 1382644 - RNA, 21 nt, Human
ccacccccaccccagccccag

SEQ ID NO: 1382645 - RNA, 21 nt, Human
ccagccccagggagaagaggg

SEQ ID NO: 1382646 - RNA, 18 nt, Human
ccagggagaagagggcgg

SEQ ID NO: 1382647 - RNA, 22 nt, Human
ccaggucccagcucccugccac

SEQ ID NO: 1382648 - RNA, 21 nt, Human
cccagggagaagagggcggau

SEQ ID NO: 1382649 - RNA, 24 nt, Human
cccagggcagaggccaggccugcc

SEQ ID NO: 1382650 - RNA, 21 nt, Human
ccccagggagaagagggcgga

SEQ ID NO: 1382651 - RNA, 18 nt, Human
cccccaccccagccccag

SEQ ID NO: 1382652 - RNA, 19 nt, Human
ccccgcccgccgcccgcga

SEQ ID NO: 1382653 - RNA, 20 nt, Human
cccugggcgccccaguccca

SEQ ID NO: 1382654 - RNA, 22 nt, Human
ccugccacccccaccccagccc

SEQ ID NO: 1382655 - RNA, 26 nt, Human
cgccccagucccagggcagaggcugg

SEQ ID NO: 1382656 - RNA, 24 nt, Human
cgcggccucaccggccagccgcgc

SEQ ID NO: 1382657 - RNA, 18 nt, Human
cuggcagaggcugggcag

SEQ ID NO: 1382658 - RNA, 23 nt, Human
gagaagagggcggaugccagagg

SEQ ID NO: 1382659 - RNA, 18 nt, Human
gagcuggcagaggcuggg

SEQ ID NO: 1382660 - RNA, 22 nt, Human
gccaggccugccuggagaaggc

SEQ ID NO: 1382661 - RNA, 20 nt, Human
ggcagguccugagugggcca

SEQ ID NO: 1382662 - RNA, 24 nt, Human
gggcagaggccaggccugccugga

SEQ ID NO: 1382663 - RNA, 27 nt, Human
gggcagaggccaggccugccuggagaa

SEQ ID NO: 1382664 - RNA, 22 nt, Human
gggcgccccagucccagggcag

SEQ ID NO: 1382665 - RNA, 22 nt, Human
uaggccaagagagaaggcacga

SEQ ID NO: 1382666 - RNA, 19 nt, Human
ucccugccacccccacccc

SEQ ID NO: 1382667 - RNA, 24 nt, Human
ugagugggccaggcuaggccaaga

SEQ ID NO: 1382668 - RNA, 23 nt, Human
ugccuggagaaggcagcacgggg

SEQ ID NO: 1382669 - RNA, 18 nt, Human
uggcagaggcugggcagg

SEQ ID NO: 1382670 - RNA, 21 nt, Human
uuuacaggaguugucucucca

SEQ ID NO: 1382671 - RNA, 18 nt, Human
aaaccgcgucuuuucccc

SEQ ID NO: 1382672 - RNA, 24 nt, Human
acuacacuguggauuccaucagug

SEQ ID NO: 1382673 - RNA, 24 nt, Human
agcagggaagcugauuuaagagaa

SEQ ID NO: 1382674 - RNA, 21 nt, Human
aggccggggccggccggacga

SEQ ID NO: 1382675 - RNA, 22 nt, Human
cacccaguccacuuucaggggc

SEQ ID NO: 1382676 - RNA, 18 nt, Human
ccaguccacuuucagggg

SEQ ID NO: 1382677 - RNA, 21 nt, Human
ccaguccacuuucaggggccc

SEQ ID NO: 1382678 - RNA, 25 nt, Human
cccacucucugccagacagaaucac

SEQ ID NO: 1382679 - RNA, 22 nt, Human
ccugguuuccuugugggaaggg

SEQ ID NO: 1382680 - RNA, 25 nt, Human
cgaggccggggccggccggacgagc

SEQ ID NO: 1382681 - RNA, 19 nt, Human
cggccggacgagcgcagag

SEQ ID NO: 1382682 - RNA, 22 nt, Human
cggccggacgagcgcagagccc

SEQ ID NO: 1382683 - RNA, 21 nt, Human
cucacucgcagucucccuccu

SEQ ID NO: 1382684 - RNA, 25 nt, Human
cucgcagucucccuccugguuuccu

SEQ ID NO: 1382685 - RNA, 21 nt, Human
cugccagacagaaucacccag

SEQ ID NO: 1382686 - RNA, 26 nt, Human
cuggaaaccgcgucuuuuccccacuc

SEQ ID NO: 1382687 - RNA, 19 nt, Human
gacagaaucacccagucca

SEQ ID NO: 1382688 - RNA, 21 nt, Human
gccgggcuggguacugcgcgg

SEQ ID NO: 1382689 - RNA, 18 nt, Human
ggcggggccgggcugggu

SEQ ID NO: 1382690 - RNA, 21 nt, Human
guacugcgcggggcggcgagg

SEQ ID NO: 1382691 - RNA, 19 nt, Human
uacacuguggauuccauca

SEQ ID NO: 1382692 - RNA, 23 nt, Human
uacacuguggauuccaucaggac

SEQ ID NO: 1382693 - RNA, 19 nt, Human
uaugaaaggcugaaaguca

SEQ ID NO: 1382694 - RNA, 23 nt, Human
ucacucgcagucucccuccuggu

SEQ ID NO: 1382695 - RNA, 19 nt, Human
ucugcaagcuggaaaccgc

SEQ ID NO: 1382696 - RNA, 19 nt, Human
ugaugagguggucccgggc

SEQ ID NO: 1382697 - RNA, 19 nt, Human
ugcuuaaacaaguaugaaa

SEQ ID NO: 1382698 - RNA, 23 nt, Human
uggaaaccgcgucuuuuccccac

SEQ ID NO: 1382699 - RNA, 27 nt, Human
uuaaacaaguaugaaaggcugaaaguc

SEQ ID NO: 1382700 - RNA, 18 nt, Human
acaaagaagaggcccaga

SEQ ID NO: 1382701 - RNA, 18 nt, Human
acaaagaagaggcccaga

SEQ ID NO: 1382702 - RNA, 19 nt, Human
acaaagaagaggcccagag

SEQ ID NO: 1382703 - RNA, 25 nt, Human
acagagcuucaggggccucacagag

SEQ ID NO: 1382704 - RNA, 25 nt, Human
acagagcuucaggggccucacagga

SEQ ID NO: 1382705 - RNA, 22 nt, Human
acagggcccuguaugcagggcu

SEQ ID NO: 1382706 - RNA, 22 nt, Human
aggcaguucacaggacagcagg

SEQ ID NO: 1382707 - RNA, 21 nt, Human
aggcaguucacagggcuuugg

SEQ ID NO: 1382708 - RNA, 19 nt, Human
cacaggacugcaggggggc

SEQ ID NO: 1382709 - RNA, 18 nt, Human
cacagggcuuugggggcc

SEQ ID NO: 1382710 - RNA, 21 nt, Human
cagagcuucaggggccucaca

SEQ ID NO: 1382711 - RNA, 21 nt, Human
cagagcuucaggggccucaca

SEQ ID NO: 1382712 - RNA, 21 nt, Human
caggcaguucacaggacagca

SEQ ID NO: 1382713 - RNA, 18 nt, Human
caggcaguucacagggcu

SEQ ID NO: 1382714 - RNA, 18 nt, Human
ccccuaggacuuggcagg

SEQ ID NO: 1382715 - RNA, 24 nt, Human
cccuaggacuuggcaggagccuca

SEQ ID NO: 1382716 - RNA, 19 nt, Human
cggggaagucagggcuucc

SEQ ID NO: 1382717 - RNA, 21 nt, Human
cucacagggcagcaggcaguu

SEQ ID NO: 1382718 - RNA, 22 nt, Human
gacuuggcaggagccucagccu

SEQ ID NO: 1382719 - RNA, 21 nt, Human
gcagcaucagggcucccacac

SEQ ID NO: 1382720 - RNA, 23 nt, Human
gccccggggaagucagggcuucc

SEQ ID NO: 1382721 - RNA, 19 nt, Human
ggccucacagggcagcagg

SEQ ID NO: 1382722 - RNA, 25 nt, Human
gggcagguacagaggccccuaggac

SEQ ID NO: 1382723 - RNA, 24 nt, Human
ucacagggcagcaggcaguucaca

SEQ ID NO: 1382724 - RNA, 19 nt, Human
ucacagggcuuugggggcc

SEQ ID NO: 1382725 - RNA, 19 nt, Human
uggggccccggggaaguca

SEQ ID NO: 1382726 - RNA, 23 nt, Human
ugggggccucacagggcagcagg

SEQ ID NO: 1382727 - RNA, 21 nt, Human
uucacaggacagcaggcaguu

SEQ ID NO: 1382728 - RNA, 24 nt, Human
uucacaggacagcaggcaguucac

SEQ ID NO: 1382729 - RNA, 24 nt, Human
uugggggccucacagggcagcagg

SEQ ID NO: 1382730 - RNA, 20 nt, Human
aaagggcucugggucuaaag

SEQ ID NO: 1382731 - RNA, 23 nt, Human
aacacacccaagaacccacagga

SEQ ID NO: 1382732 - RNA, 22 nt, Human
aacccacugccuagaucuccaa

SEQ ID NO: 1382733 - RNA, 18 nt, Human
aagcaaaugagaccaggc

SEQ ID NO: 1382734 - RNA, 21 nt, Human
acaucucucaugagcaaagcc

SEQ ID NO: 1382735 - RNA, 26 nt, Human
accaaagccacagagaccucaaucug

SEQ ID NO: 1382736 - RNA, 19 nt, Human
accugcauuggguccuuua

SEQ ID NO: 1382737 - RNA, 23 nt, Human
acuacacauauaccccccuuccc

SEQ ID NO: 1382738 - RNA, 18 nt, Human
acuuugggagcauuaugg

SEQ ID NO: 1382739 - RNA, 29 nt, Human
agaagccuuuuuuuuuuuuuuuuuuuuuu

SEQ ID NO: 1382740 - RNA, 19 nt, Human
agacagaaaguaaaaacug

SEQ ID NO: 1382741 - RNA, 23 nt, Human
agacagaaaguaaaaacugguua

SEQ ID NO: 1382742 - RNA, 20 nt, Human
agagcagagcugggacacgg

SEQ ID NO: 1382743 - RNA, 19 nt, Human
agccacagagaccucaauc

SEQ ID NO: 1382744 - RNA, 20 nt, Human
agccuuuuuuuuuuuuuuuu

SEQ ID NO: 1382745 - RNA, 27 nt, Human
aggaaagggucacuuuaggggucuggc

SEQ ID NO: 1382746 - RNA, 25 nt, Human
aggcacagaaggaggcacagaauga

SEQ ID NO: 1382747 - RNA, 19 nt, Human
aggcaguccuagagcagag

SEQ ID NO: 1382748 - RNA, 22 nt, Human
aggcaguccuagagcagagcug

SEQ ID NO: 1382749 - RNA, 21 nt, Human
agggaagcaaaugagaccagg

SEQ ID NO: 1382750 - RNA, 18 nt, Human
aggggccgcagugggagg

SEQ ID NO: 1382751 - RNA, 19 nt, Human
agugccuguuuucaaacgg

SEQ ID NO: 1382752 - RNA, 19 nt, Human
caaagccugaugccuccag

SEQ ID NO: 1382753 - RNA, 24 nt, Human
caaagugccgagcuuggcugcaua

SEQ ID NO: 1382754 - RNA, 21 nt, Human
cacacgaugagccuggcaggg

SEQ ID NO: 1382755 - RNA, 22 nt, Human
cagagcugugcuguugcucucc

SEQ ID NO: 1382756 - RNA, 18 nt, Human
caguccuagagcagagcu

SEQ ID NO: 1382757 - RNA, 21 nt, Human
cauguguauacaguuacaugg

SEQ ID NO: 1382758 - RNA, 19 nt, Human
cccaagaacccacaggaau

SEQ ID NO: 1382759 - RNA, 25 nt, Human
cccaagaacccacaggaauaugucc

SEQ ID NO: 1382760 - RNA, 24 nt, Human
cccacacugaggcacaguuaaagg

SEQ ID NO: 1382761 - RNA, 24 nt, Human
ccccccgagcugaggaggcuucgc

SEQ ID NO: 1382762 - RNA, 19 nt, Human
ccccccuucccuaaaaucu

SEQ ID NO: 1382763 - RNA, 25 nt, Human
cccccuggccuuggagcacuggcuc

SEQ ID NO: 1382764 - RNA, 18 nt, Human
cccucccuccccauaccc

SEQ ID NO: 1382765 - RNA, 20 nt, Human
ccuaacccacacugaggcac

SEQ ID NO: 1382766 - RNA, 20 nt, Human
cuacuacacauauacccccc

SEQ ID NO: 1382767 - RNA, 20 nt, Human
cucacuggguccccggcccc

SEQ ID NO: 1382768 - RNA, 26 nt, Human
cugacaucucucaugagcaaagcccc

SEQ ID NO: 1382769 - RNA, 21 nt, Human
cugaggcacaguuaaagggaa

SEQ ID NO: 1382770 - RNA, 18 nt, Human
gacaccuggucccagguc

SEQ ID NO: 1382771 - RNA, 25 nt, Human
gagcugugcuguugcucuccgggac

SEQ ID NO: 1382772 - RNA, 20 nt, Human
gaggaugggcgccacgggaa

SEQ ID NO: 1382773 - RNA, 24 nt, Human
gaggcaguccuagagcagagcugg

SEQ ID NO: 1382774 - RNA, 19 nt, Human
gcaaacacacccaagaacc

SEQ ID NO: 1382775 - RNA, 21 nt, Human
gcagugggaggcaguccuaga

SEQ ID NO: 1382776 - RNA, 27 nt, Human
gccuuuuuuuuuuuuuuuuuuuuuugg

SEQ ID NO: 1382777 - RNA, 28 nt, Human
gccuuuuuuuuuuuuuuuuuuuuuuggu

SEQ ID NO: 1382778 - RNA, 21 nt, Human
ggaagcaaaugagaccaggcu

SEQ ID NO: 1382779 - RNA, 24 nt, Human
ggcaaacacacccaagaacccaca

SEQ ID NO: 1382780 - RNA, 24 nt, Human
gggccgcagugggaggcaguccua

SEQ ID NO: 1382781 - RNA, 18 nt, Human
gguccuuuaucaucuuaa

SEQ ID NO: 1382782 - RNA, 22 nt, Human
gucaggugaggggccgcagugg

SEQ ID NO: 1382783 - RNA, 21 nt, Human
uaagcagggucaccaaagcca

SEQ ID NO: 1382784 - RNA, 25 nt, Human
uaauacaauaacaaaauuguucccu

SEQ ID NO: 1382785 - RNA, 18 nt, Human
uacaaagugccgagcuug

SEQ ID NO: 1382786 - RNA, 26 nt, Human
uacauggaaccuucaggucagugggg

SEQ ID NO: 1382787 - RNA, 22 nt, Human
uacauguacaucauucuagaca

SEQ ID NO: 1382788 - RNA, 21 nt, Human
uagacagaaaguaaaaacugg

SEQ ID NO: 1382789 - RNA, 22 nt, Human
uagaucuccaacugaagagcuc

SEQ ID NO: 1382790 - RNA, 18 nt, Human
uaggaggcacagaaggag

SEQ ID NO: 1382791 - RNA, 19 nt, Human
uagggcagaagaggaaagg

SEQ ID NO: 1382792 - RNA, 21 nt, Human
ucaaagccugaugccuccagg

SEQ ID NO: 1382793 - RNA, 20 nt, Human
ucaccaaagccacagagacc

SEQ ID NO: 1382794 - RNA, 19 nt, Human
ucccaggucaguuggaccc

SEQ ID NO: 1382795 - RNA, 24 nt, Human
ucccaggucaguuggaccccagca

SEQ ID NO: 1382796 - RNA, 24 nt, Human
ucuaaagaagccuuuuuuuuuuuu

SEQ ID NO: 1382797 - RNA, 23 nt, Human
ucuacauuacgugaguccaaaaa

SEQ ID NO: 1382798 - RNA, 23 nt, Human
ucuccaacugaagagcuccuuuc

SEQ ID NO: 1382799 - RNA, 25 nt, Human
ucucucaugagcaaagcccccuggc

SEQ ID NO: 1382800 - RNA, 21 nt, Human
ucucugcgcgacaccuggucc

SEQ ID NO: 1382801 - RNA, 18 nt, Human
ugagagcgucaggcagag

SEQ ID NO: 1382802 - RNA, 24 nt, Human
ugaggggccgcagugggaggcagu

SEQ ID NO: 1382803 - RNA, 21 nt, Human
ugauguggcaaacacacccaa

SEQ ID NO: 1382804 - RNA, 19 nt, Human
uggcaaacacacccaagaa

SEQ ID NO: 1382805 - RNA, 20 nt, Human
uggcagggaagcaaaugaga

SEQ ID NO: 1382806 - RNA, 23 nt, Human
uggcucccucccuccccauaccc

SEQ ID NO: 1382807 - RNA, 21 nt, Human
uggcuuaacccacugccuaga

SEQ ID NO: 1382808 - RNA, 19 nt, Human
uggguccccggccccccga

SEQ ID NO: 1382809 - RNA, 19 nt, Human
uguccaagcuggcacugca

SEQ ID NO: 1382810 - RNA, 24 nt, Human
ugugcuguugcucuccgggacuug

SEQ ID NO: 1382811 - RNA, 18 nt, Human
uguggcaaacacacccaa

SEQ ID NO: 1382812 - RNA, 21 nt, Human
uguggcaaacacacccaagaa

SEQ ID NO: 1382813 - RNA, 22 nt, Human
uguggcaaacacacccaagaac

SEQ ID NO: 1382814 - RNA, 18 nt, Human
uucauguguauacaguua

SEQ ID NO: 1382815 - RNA, 18 nt, Human
uuuuuuuuuuuuuuuuug

SEQ ID NO: 1382816 - RNA, 20 nt, Human
uuuuuuuuuuuuuuuuuggu

SEQ ID NO: 1382817 - RNA, 22 nt, Human
uuggagccggcgcugagcuggg

SEQ ID NO: 1382818 - RNA, 18 nt, Human
aaaaaacaagauagaggc

SEQ ID NO: 1382819 - RNA, 22 nt, Human
aaaaacaaaaaacaagauagag

SEQ ID NO: 1382820 - RNA, 18 nt, Human
acuaugugccaggcacug

SEQ ID NO: 1382821 - RNA, 25 nt, Human
agaggcagcaaacacaaauucugag

SEQ ID NO: 1382822 - RNA, 22 nt, Human
aggcagcaaacacaaauucuga

SEQ ID NO: 1382823 - RNA, 22 nt, Human
auucugagggagaggaaacggg

SEQ ID NO: 1382824 - RNA, 19 nt, Human
caaaaaacaagauagaggc

SEQ ID NO: 1382825 - RNA, 18 nt, Human
cagaagaaaaaacaaaaa

SEQ ID NO: 1382826 - RNA, 21 nt, Human
cagcgaggugcgaacgcggcg

SEQ ID NO: 1382827 - RNA, 18 nt, Human
ccagaagaaaaaacaaaa

SEQ ID NO: 1382828 - RNA, 19 nt, Human
cccagaagaaaaaacaaaa

SEQ ID NO: 1382829 - RNA, 19 nt, Human
cccuagaugcuggagcagc

SEQ ID NO: 1382830 - RNA, 20 nt, Human
cuaugugccaggcacuguuc

SEQ ID NO: 1382831 - RNA, 18 nt, Human
cugagggagaggaaacgg

SEQ ID NO: 1382832 - RNA, 29 nt, Human
gaagguuggaauaugcccuagaugcuggg

SEQ ID NO: 1382833 - RNA, 22 nt, Human
gagaagccugaggugauggggg

SEQ ID NO: 1382834 - RNA, 23 nt, Human
gagaagccugaggugaugggggc

SEQ ID NO: 1382835 - RNA, 21 nt, Human
gagggagaggaaacgggcagu

SEQ ID NO: 1382836 - RNA, 20 nt, Human
ggcaguugaguaagacggcu

SEQ ID NO: 1382837 - RNA, 22 nt, Human
uccccagaagaaaaaacaaaaa

SEQ ID NO: 1382838 - RNA, 18 nt, Human
ucuagacccuccccagaa

SEQ ID NO: 1382839 - RNA, 23 nt, Human
ucuagacccuccccagaagaaaa

SEQ ID NO: 1382840 - RNA, 21 nt, Human
ugcccuagaugcuggagcagc

SEQ ID NO: 1382841 - RNA, 21 nt, Human
uggaagguuggaauaugcccu

SEQ ID NO: 1382842 - RNA, 22 nt, Human
uggaagguuggaauaugcccua

SEQ ID NO: 1382843 - RNA, 21 nt, Human
uuuaauuuuuuugcucacuuc

SEQ ID NO: 1382844 - RNA, 24 nt, Human
aaagugcagaaauuacgggcauga

SEQ ID NO: 1382845 - RNA, 22 nt, Human
aaauuacgggcaugagccacug

SEQ ID NO: 1382846 - RNA, 22 nt, Human
aaccccuggccucaggcaaucc

SEQ ID NO: 1382847 - RNA, 21 nt, Human
aaggugggagauuccaggccc

SEQ ID NO: 1382848 - RNA, 26 nt, Human
aagugcagaaauuacgggcaugagcc

SEQ ID NO: 1382849 - RNA, 18 nt, Human
aagugcugggauuacagg

SEQ ID NO: 1382850 - RNA, 18 nt, Human
aagugcugggauuacagg

SEQ ID NO: 1382851 - RNA, 19 nt, Human
aagugcugggauuacaggu

SEQ ID NO: 1382852 - RNA, 22 nt, Human
aagugcugggauuacaggugug

SEQ ID NO: 1382853 - RNA, 23 nt, Human
aagugcugggauuacagguguga

SEQ ID NO: 1382854 - RNA, 26 nt, Human
aagugcugggauuacaggugugagcc

SEQ ID NO: 1382855 - RNA, 18 nt, Human
aauuacgggcaugagcca

SEQ ID NO: 1382856 - RNA, 24 nt, Human
aauuacgggcaugagccacugugc

SEQ ID NO: 1382857 - RNA, 19 nt, Human
acaggcaccugccaccacg

SEQ ID NO: 1382858 - RNA, 24 nt, Human
accauguuggccaggcuggucucg

SEQ ID NO: 1382859 - RNA, 21 nt, Human
accccacccccagagccccac

SEQ ID NO: 1382860 - RNA, 22 nt, Human
acuugcucuuaacugcauacgc

SEQ ID NO: 1382861 - RNA, 22 nt, Human
acuugcuuuuuuuuuuuuuuuu

SEQ ID NO: 1382862 - RNA, 24 nt, Human
agaaauuacgggcaugagccacug

SEQ ID NO: 1382863 - RNA, 20 nt, Human
agaauuagaaccccagagga

SEQ ID NO: 1382864 - RNA, 22 nt, Human
agccagaauuagaaccccagag

SEQ ID NO: 1382865 - RNA, 18 nt, Human
aggcaauccuccugccuc

SEQ ID NO: 1382866 - RNA, 18 nt, Human
aggcacucggcaccacgg

SEQ ID NO: 1382867 - RNA, 25 nt, Human
aggcuggagugcaguggcgugaucu

SEQ ID NO: 1382868 - RNA, 22 nt, Human
aggcuggucucaaaccccuggc

SEQ ID NO: 1382869 - RNA, 27 nt, Human
agguacuugcuuuuuuuuuuuuuuuuu

SEQ ID NO: 1382870 - RNA, 21 nt, Human
aguagcugggauuacaggcac

SEQ ID NO: 1382871 - RNA, 23 nt, Human
agugcaguggcgugaucuuggcu

SEQ ID NO: 1382872 - RNA, 24 nt, Human
agugcaguggcgugaucuuggcuc

SEQ ID NO: 1382873 - RNA, 20 nt, Human
agugcugggauuacaggugu

SEQ ID NO: 1382874 - RNA, 21 nt, Human
auccuccugccucagccuccc

SEQ ID NO: 1382875 - RNA, 24 nt, Human
auggggucucgcuauguugcucag

SEQ ID NO: 1382876 - RNA, 18 nt, Human
augggguuucaccauguu

SEQ ID NO: 1382877 - RNA, 22 nt, Human
augggguuucaccauguuggcc

SEQ ID NO: 1382878 - RNA, 23 nt, Human
augggguuucaccauguuggcca

SEQ ID NO: 1382879 - RNA, 24 nt, Human
augggguuucaccauguuggccag

SEQ ID NO: 1382880 - RNA, 20 nt, Human
auguugcucaggcuggucuc

SEQ ID NO: 1382881 - RNA, 22 nt, Human
auucuguggcccaggcuggagu

SEQ ID NO: 1382882 - RNA, 24 nt, Human
caaaccccuggccucaggcaaucc

SEQ ID NO: 1382883 - RNA, 24 nt, Human
caaagugcagaaauuacgggcaug

SEQ ID NO: 1382884 - RNA, 22 nt, Human
caagcaauucuccugccucagc

SEQ ID NO: 1382885 - RNA, 19 nt, Human
caagugauccacccaccuc

SEQ ID NO: 1382886 - RNA, 24 nt, Human
caagugcugggauuacagguguga

SEQ ID NO: 1382887 - RNA, 23 nt, Human
cacacuaaacauuguccauauug

SEQ ID NO: 1382888 - RNA, 21 nt, Human
caccauguuggccaggcuggu

SEQ ID NO: 1382889 - RNA, 24 nt, Human
caccauguuggccaggcuggucuc

SEQ ID NO: 1382890 - RNA, 27 nt, Human
caccauguuggccaggcuggucucgaa

SEQ ID NO: 1382891 - RNA, 22 nt, Human
cacccaccucagucucccaaag

SEQ ID NO: 1382892 - RNA, 23 nt, Human
cacccaccucagucucccaaagu

SEQ ID NO: 1382893 - RNA, 20 nt, Human
caccccacccccagagcccc

SEQ ID NO: 1382894 - RNA, 19 nt, Human
cacuggggugaaggaggag

SEQ ID NO: 1382895 - RNA, 19 nt, Human
cacugugcccggccaaggc

SEQ ID NO: 1382896 - RNA, 22 nt, Human
cagcauuuuccaccccaccccc

SEQ ID NO: 1382897 - RNA, 20 nt, Human
cagccuccugaguagcuggg

SEQ ID NO: 1382898 - RNA, 22 nt, Human
caggcaauccuccugccucagc

SEQ ID NO: 1382899 - RNA, 21 nt, Human
caggcaccugccaccacgccc

SEQ ID NO: 1382900 - RNA, 18 nt, Human
caucaagaacacaucugu

SEQ ID NO: 1382901 - RNA, 24 nt, Human
cauguuggccaggcuggucucgaa

SEQ ID NO: 1382902 - RNA, 24 nt, Human
cauucuguggcccaggcuggagug

SEQ ID NO: 1382903 - RNA, 24 nt, Human
ccaaagugcagaaauuacgggcau

SEQ ID NO: 1382904 - RNA, 19 nt, Human
ccaagugcugggauuacag

SEQ ID NO: 1382905 - RNA, 20 nt, Human
ccaagugcugggauuacagg

SEQ ID NO: 1382906 - RNA, 20 nt, Human
ccaagugcugggauuacagg

SEQ ID NO: 1382907 - RNA, 20 nt, Human
ccaccacgcccggcuaauuu

SEQ ID NO: 1382908 - RNA, 22 nt, Human
cccaagugcugggauuacaggu

SEQ ID NO: 1382909 - RNA, 24 nt, Human
cccaagugcugggauuacaggugu

SEQ ID NO: 1382910 - RNA, 22 nt, Human
ccccaagugcugggauuacagg

SEQ ID NO: 1382911 - RNA, 20 nt, Human
ccccagaggaucaagguggg

SEQ ID NO: 1382912 - RNA, 21 nt, Human
cccccaucaagaacacaucug

SEQ ID NO: 1382913 - RNA, 22 nt, Human
ccccugagccagaauuagaacc

SEQ ID NO: 1382914 - RNA, 18 nt, Human
cccggccaaggcacuugc

SEQ ID NO: 1382915 - RNA, 18 nt, Human
cccuggagguucaaggcg

SEQ ID NO: 1382916 - RNA, 20 nt, Human
ccgcccucuuucugccagau

SEQ ID NO: 1382917 - RNA, 27 nt, Human
ccgccuccuggguucaagcaauucuuu

SEQ ID NO: 1382918 - RNA, 19 nt, Human
ccuccgccuccuggguuca

SEQ ID NO: 1382919 - RNA, 25 nt, Human
ccuccugccucagccuccccaagug

SEQ ID NO: 1382920 - RNA, 24 nt, Human
ccuccuggguucaagcaauucucc

SEQ ID NO: 1382921 - RNA, 24 nt, Human
ccugacgucaagugauccacccac

SEQ ID NO: 1382922 - RNA, 23 nt, Human
ccugaguagcugggauuacaggc

SEQ ID NO: 1382923 - RNA, 24 nt, Human
ccugaguagcugggauuacaggca

SEQ ID NO: 1382924 - RNA, 24 nt, Human
ccugccucagccuccccaagugcu

SEQ ID NO: 1382925 - RNA, 23 nt, Human
ccugccucagccuccugaguagc

SEQ ID NO: 1382926 - RNA, 18 nt, Human
ccuggccucaggcaaucc

SEQ ID NO: 1382927 - RNA, 23 nt, Human
ccuggguucaagcaauucuccug

SEQ ID NO: 1382928 - RNA, 18 nt, Human
cgcccucuuucugccaga

SEQ ID NO: 1382929 - RNA, 18 nt, Human
cggcaaccuccgccuccu

SEQ ID NO: 1382930 - RNA, 24 nt, Human
cggcaaccuccgccuccuggguuc

SEQ ID NO: 1382931 - RNA, 22 nt, Human
cggcccaaggcagcaggcacuc

SEQ ID NO: 1382932 - RNA, 22 nt, Human
cgucaagugauccacccaccuc

SEQ ID NO: 1382933 - RNA, 20 nt, Human
cuaucccccaucaagaacac

SEQ ID NO: 1382934 - RNA, 19 nt, Human
cucaaaccccuggccucag

SEQ ID NO: 1382935 - RNA, 24 nt, Human
cucagccuccugaguagcugggau

SEQ ID NO: 1382936 - RNA, 21 nt, Human
cuccuggguucaagcaauucu

SEQ ID NO: 1382937 - RNA, 26 nt, Human
cucuuaacugcauacgcgcaugcaca

SEQ ID NO: 1382938 - RNA, 23 nt, Human
cugaguagcugggauuacaggca

SEQ ID NO: 1382939 - RNA, 23 nt, Human
cugccucagccuccugaguagcu

SEQ ID NO: 1382940 - RNA, 22 nt, Human
cuggaaacccuggagguucaag

SEQ ID NO: 1382941 - RNA, 21 nt, Human
gaaauuacgggcaugagccac

SEQ ID NO: 1382942 - RNA, 23 nt, Human
gaaauuacgggcaugagccacug

SEQ ID NO: 1382943 - RNA, 24 nt, Human
gacgucaagugauccacccaccuc

SEQ ID NO: 1382944 - RNA, 18 nt, Human
gagaugggguuucaccau

SEQ ID NO: 1382945 - RNA, 24 nt, Human
gagaugggguuucaccauguuggc

SEQ ID NO: 1382946 - RNA, 25 nt, Human
gaguagcugggauuacaggcaccug

SEQ ID NO: 1382947 - RNA, 18 nt, Human
gauuacaggugugagcca

SEQ ID NO: 1382948 - RNA, 21 nt, Human
gauuacaggugugagccacca

SEQ ID NO: 1382949 - RNA, 22 nt, Human
gauuacaggugugagccaccac

SEQ ID NO: 1382950 - RNA, 23 nt, Human
gcaauccuccugccucagccucc

SEQ ID NO: 1382951 - RNA, 26 nt, Human
gcaauccuccugccucagccucccca

SEQ ID NO: 1382952 - RNA, 21 nt, Human
gccaauuuuagcuucagcugg

SEQ ID NO: 1382953 - RNA, 20 nt, Human
gcccaggcuggagugcagug

SEQ ID NO: 1382954 - RNA, 24 nt, Human
gcccaggcuggagugcaguggcgu

SEQ ID NO: 1382955 - RNA, 23 nt, Human
gcccggcuaauuuuuuguauuuu

SEQ ID NO: 1382956 - RNA, 19 nt, Human
gcuggagugcaguggcgug

SEQ ID NO: 1382957 - RNA, 23 nt, Human
gcuggucucaaaccccuggccuc

SEQ ID NO: 1382958 - RNA, 22 nt, Human
ggcaugagccacugugcccggc

SEQ ID NO: 1382959 - RNA, 24 nt, Human
ggcccaggcuggagugcaguggcg

SEQ ID NO: 1382960 - RNA, 22 nt, Human
ggcuggagugcaguggcgugau

SEQ ID NO: 1382961 - RNA, 19 nt, Human
gggagaggagguguggggc

SEQ ID NO: 1382962 - RNA, 19 nt, Human
gggagaggagguguggggc

SEQ ID NO: 1382963 - RNA, 22 nt, Human
gggguuucaccauguuggccag

SEQ ID NO: 1382964 - RNA, 22 nt, Human
gggucucgcuauguugcucagg

SEQ ID NO: 1382965 - RNA, 22 nt, Human
ggguuucaccauguuggccagg

SEQ ID NO: 1382966 - RNA, 23 nt, Human
guagagaugggguuucaccaugu

SEQ ID NO: 1382967 - RNA, 18 nt, Human
guagcugggauuacaggc

SEQ ID NO: 1382968 - RNA, 24 nt, Human
gugauccacccaccucagucuccc

SEQ ID NO: 1382969 - RNA, 19 nt, Human
guggcccaggcuggagugc

SEQ ID NO: 1382970 - RNA, 22 nt, Human
uaaagauggggucucgcuaugu

SEQ ID NO: 1382971 - RNA, 24 nt, Human
uaauuuuuuguauuuuuaguagag

SEQ ID NO: 1382972 - RNA, 23 nt, Human
uacaggcaccugccaccacgccc

SEQ ID NO: 1382973 - RNA, 22 nt, Human
uacaggugugagccaccacacu

SEQ ID NO: 1382974 - RNA, 24 nt, Human
uacaggugugagccaccacacuca

SEQ ID NO: 1382975 - RNA, 24 nt, Human
uacgggcaugagccacugugcccg

SEQ ID NO: 1382976 - RNA, 22 nt, Human
uagagaugggguuucaccaugu

SEQ ID NO: 1382977 - RNA, 30 nt, Human
uagcuccaggugguaaaaguccuggcccca

SEQ ID NO: 1382978 - RNA, 24 nt, Human
uaguagagaugggguuucaccaug

SEQ ID NO: 1382979 - RNA, 26 nt, Human
uaguagagaugggguuucaccauguu

SEQ ID NO: 1382980 - RNA, 23 nt, Human
uauguugcucaggcuggucucaa

SEQ ID NO: 1382981 - RNA, 24 nt, Human
uauguugcucaggcuggucucaaa

SEQ ID NO: 1382982 - RNA, 19 nt, Human
ucaagcaauucuccugccu

SEQ ID NO: 1382983 - RNA, 24 nt, Human
ucacggcaaccuccgccuccuggg

SEQ ID NO: 1382984 - RNA, 25 nt, Human
ucacggcaaccuccgccuccugggu

SEQ ID NO: 1382985 - RNA, 27 nt, Human
ucacggcaaccuccgccuccuggguuc

SEQ ID NO: 1382986 - RNA, 20 nt, Human
ucagccuccugaguagcugg

SEQ ID NO: 1382987 - RNA, 21 nt, Human
uccacccaccucagucuccca

SEQ ID NO: 1382988 - RNA, 24 nt, Human
uccaccccacccccagagccccac

SEQ ID NO: 1382989 - RNA, 24 nt, Human
ucccaaagugcagaaauuacgggc

SEQ ID NO: 1382990 - RNA, 23 nt, Human
uccccaagugcugggauuacagg

SEQ ID NO: 1382991 - RNA, 24 nt, Human
uccgccuccuggguucaagcaauu

SEQ ID NO: 1382992 - RNA, 24 nt, Human
uccugaguagcugggauuacaggc

SEQ ID NO: 1382993 - RNA, 21 nt, Human
uccuggguucaagcaauucuc

SEQ ID NO: 1382994 - RNA, 24 nt, Human
uccuggguucaagcaauucuccug

SEQ ID NO: 1382995 - RNA, 18 nt, Human
ucgugagauggagucuca

SEQ ID NO: 1382996 - RNA, 23 nt, Human
ucucauucuguggcccaggcugg

SEQ ID NO: 1382997 - RNA, 24 nt, Human
ucucauucuguggcccaggcugga

SEQ ID NO: 1382998 - RNA, 20 nt, Human
ucucccaaagugcagaaauu

SEQ ID NO: 1382999 - RNA, 24 nt, Human
ucuccugccucagccuccugagua

SEQ ID NO: 1383000 - RNA, 21 nt, Human
ucucgaacuccugacgucaag

SEQ ID NO: 1383001 - RNA, 18 nt, Human
ucucgcuauguugcucag

SEQ ID NO: 1383002 - RNA, 19 nt, Human
ucucgcuauguugcucagg

SEQ ID NO: 1383003 - RNA, 23 nt, Human
ucucgcuauguugcucaggcugg

SEQ ID NO: 1383004 - RNA, 24 nt, Human
ucucgcuauguugcucaggcuggu

SEQ ID NO: 1383005 - RNA, 18 nt, Human
ucuguggcccaggcugga

SEQ ID NO: 1383006 - RNA, 23 nt, Human
ugacuggacaugagccuggcaug

SEQ ID NO: 1383007 - RNA, 21 nt, Human
ugagccagaauuagaacccca

SEQ ID NO: 1383008 - RNA, 24 nt, Human
ugauccacccaccucagucuccca

SEQ ID NO: 1383009 - RNA, 24 nt, Human
ugccucagccuccccaagugcugg

SEQ ID NO: 1383010 - RNA, 24 nt, Human
ugccucagccuccugaguagcugg

SEQ ID NO: 1383011 - RNA, 26 nt, Human
ugcucuuaacugcauacgcgcaugca

SEQ ID NO: 1383012 - RNA, 24 nt, Human
ugcugggauuacaggugugagcca

SEQ ID NO: 1383013 - RNA, 19 nt, Human
uggagugcaguggcgugau

SEQ ID NO: 1383014 - RNA, 23 nt, Human
uggagugcaguggcgugaucuug

SEQ ID NO: 1383015 - RNA, 24 nt, Human
uggagugcaguggcgugaucuugg

SEQ ID NO: 1383016 - RNA, 24 nt, Human
uggccaggcuggucucgaacuccu

SEQ ID NO: 1383017 - RNA, 18 nt, Human
uggcccaggcuggagugc

SEQ ID NO: 1383018 - RNA, 20 nt, Human
uggccucaggcaauccuccu

SEQ ID NO: 1383019 - RNA, 24 nt, Human
uggccucaggcaauccuccugccu

SEQ ID NO: 1383020 - RNA, 19 nt, Human
ugggagauuccaggccccg

SEQ ID NO: 1383021 - RNA, 21 nt, Human
ugggauuacaggcaccugcca

SEQ ID NO: 1383022 - RNA, 22 nt, Human
ugggauuacaggcaccugccac

SEQ ID NO: 1383023 - RNA, 24 nt, Human
ugggauuacaggcaccugccacca

SEQ ID NO: 1383024 - RNA, 18 nt, Human
ugggauuacaggugugag

SEQ ID NO: 1383025 - RNA, 19 nt, Human
ugggauuacaggugugagc

SEQ ID NO: 1383026 - RNA, 22 nt, Human
ugggauuacaggugugagccac

SEQ ID NO: 1383027 - RNA, 23 nt, Human
ugggauuacaggugugagccacc

SEQ ID NO: 1383028 - RNA, 24 nt, Human
ugggauuacaggugugagccacca

SEQ ID NO: 1383029 - RNA, 24 nt, Human
uggggucucgcuauguugcucagg

SEQ ID NO: 1383030 - RNA, 18 nt, Human
uggggugaaggaggagga

SEQ ID NO: 1383031 - RNA, 24 nt, Human
ugggguuucaccauguuggccagg

SEQ ID NO: 1383032 - RNA, 21 nt, Human
uggguucaagcaauucuccug

SEQ ID NO: 1383033 - RNA, 23 nt, Human
uggguucaagcaauucuccugcc

SEQ ID NO: 1383034 - RNA, 24 nt, Human
uggguucaagcaauucuccugccu

SEQ ID NO: 1383035 - RNA, 21 nt, Human
uguauuuuuaguagagauggg

SEQ ID NO: 1383036 - RNA, 21 nt, Human
uguggcccaggcuggagugca

SEQ ID NO: 1383037 - RNA, 20 nt, Human
uguugcucaggcuggucuca

SEQ ID NO: 1383038 - RNA, 18 nt, Human
uuaguagagaugggguuu

SEQ ID NO: 1383039 - RNA, 22 nt, Human
uuaguagagaugggguuucacc

SEQ ID NO: 1383040 - RNA, 24 nt, Human
uuaguagagaugggguuucaccau

SEQ ID NO: 1383041 - RNA, 21 nt, Human
uucaagcaauucuccugccuc

SEQ ID NO: 1383042 - RNA, 24 nt, Human
uucaagcaauucuccugccucagc

SEQ ID NO: 1383043 - RNA, 18 nt, Human
uucuguggcccaggcugg

SEQ ID NO: 1383044 - RNA, 24 nt, Human
uuucaccauguuggccaggcuggu

SEQ ID NO: 1383045 - RNA, 24 nt, Human
uuuuuaguagagaugggguuucac

SEQ ID NO: 1383046 - RNA, 21 nt, Human
uuuuuguauuuuuaguagaga

SEQ ID NO: 1383047 - RNA, 24 nt, Human
uuuuuuguauuuuuaguagagaug

SEQ ID NO: 1383048 - RNA, 18 nt, Human
uuuuuuuuuuuuuuuucg

SEQ ID NO: 1383049 - RNA, 20 nt, Human
uuuuuuuuuuuuuuuuucgu

SEQ ID NO: 1383050 - RNA, 21 nt, Human
acuuuggcuuccagaaaagag

SEQ ID NO: 1383051 - RNA, 21 nt, Human
agagggaagguggggaccuag

SEQ ID NO: 1383052 - RNA, 19 nt, Human
caccugagucccccaggac

SEQ ID NO: 1383053 - RNA, 24 nt, Human
cccaggaccagggcaucccaaggc

SEQ ID NO: 1383054 - RNA, 19 nt, Human
cccugaacccgggguuccc

SEQ ID NO: 1383055 - RNA, 21 nt, Human
ccuggcccugaacccgggguu

SEQ ID NO: 1383056 - RNA, 24 nt, Human
cuaguaacaauaaccauuuauucc

SEQ ID NO: 1383057 - RNA, 19 nt, Human
gaccuaguaacaauaacca

SEQ ID NO: 1383058 - RNA, 22 nt, Human
gcaccugagucccccaggacca

SEQ ID NO: 1383059 - RNA, 21 nt, Human
gcccugaacccgggguuccca

SEQ ID NO: 1383060 - RNA, 20 nt, Human
gggaagguggggaccuagua

SEQ ID NO: 1383061 - RNA, 18 nt, Human
ugagucccccaggaccag

SEQ ID NO: 1383062 - RNA, 20 nt, Human
ugagucccccaggaccaggg

SEQ ID NO: 1383063 - RNA, 25 nt, Human
uggcccugaacccgggguucccucc

SEQ ID NO: 1383064 - RNA, 23 nt, Human
uggggaggcugacuuuggcuucc

SEQ ID NO: 1383065 - RNA, 19 nt, Human
uuuuuuuuuuuaggcagug

SEQ ID NO: 1383066 - RNA, 23 nt, Human
uuuuuuuuuuuuuuuuuuuuagg

SEQ ID NO: 1383067 - RNA, 21 nt, Human
aacuguccggccccgagucac

SEQ ID NO: 1383068 - RNA, 23 nt, Human
accaagggcgggcagcacccucc

SEQ ID NO: 1383069 - RNA, 24 nt, Human
acugggcauuuugcuucuugucau

SEQ ID NO: 1383070 - RNA, 22 nt, Human
caaaggcuuggcucccgaaugu

SEQ ID NO: 1383071 - RNA, 21 nt, Human
caagggcgggcagcacccucc

SEQ ID NO: 1383072 - RNA, 20 nt, Human
cacagauauaguuccgcacc

SEQ ID NO: 1383073 - RNA, 19 nt, Human
cacuggucacaggcaaagu

SEQ ID NO: 1383074 - RNA, 28 nt, Human
cagagacuuuccuuucuggguaaggcuc

SEQ ID NO: 1383075 - RNA, 19 nt, Human
cagcacccuccgacccucc

SEQ ID NO: 1383076 - RNA, 18 nt, Human
cagcccugguaaggacac

SEQ ID NO: 1383077 - RNA, 21 nt, Human
caggcaaaguccagcucaguc

SEQ ID NO: 1383078 - RNA, 20 nt, Human
cauuuugcuucuugucauuu

SEQ ID NO: 1383079 - RNA, 22 nt, Human
ccagcagaaucccgcgggugcu

SEQ ID NO: 1383080 - RNA, 21 nt, Human
cccgagguuccuagaggaccc

SEQ ID NO: 1383081 - RNA, 18 nt, Human
cccugggaggggguccug

SEQ ID NO: 1383082 - RNA, 23 nt, Human
ccucacaccugggggacagaggc

SEQ ID NO: 1383083 - RNA, 21 nt, Human
ccugcacuggaacccacagac

SEQ ID NO: 1383084 - RNA, 24 nt, Human
cgggugcaccauggacauguguac

SEQ ID NO: 1383085 - RNA, 22 nt, Human
cgugcagcccugguaaggacac

SEQ ID NO: 1383086 - RNA, 18 nt, Human
cucacacuuacugcaaag

SEQ ID NO: 1383087 - RNA, 23 nt, Human
cucgguggcccagguggugguuc

SEQ ID NO: 1383088 - RNA, 18 nt, Human
cucuguguggaugagcuu

SEQ ID NO: 1383089 - RNA, 21 nt, Human
cucuguguggaugagcuucac

SEQ ID NO: 1383090 - RNA, 23 nt, Human
cuggaacccacagaccucacacc

SEQ ID NO: 1383091 - RNA, 23 nt, Human
cuggaacccacagaccucacacc

SEQ ID NO: 1383092 - RNA, 20 nt, Human
cuucaccgccuggcccucug

SEQ ID NO: 1383093 - RNA, 22 nt, Human
cuuccauccgggcuuggguccc

SEQ ID NO: 1383094 - RNA, 21 nt, Human
gacacuuguagauggugggaa

SEQ ID NO: 1383095 - RNA, 19 nt, Human
gcagcggaggacgccagca

SEQ ID NO: 1383096 - RNA, 21 nt, Human
gccuccagcaccaagggcggg

SEQ ID NO: 1383097 - RNA, 20 nt, Human
gcgggugcacacgaagggug

SEQ ID NO: 1383098 - RNA, 24 nt, Human
gcucgguggcccagguggugguuc

SEQ ID NO: 1383099 - RNA, 19 nt, Human
ggaugagcuucacguggcg

SEQ ID NO: 1383100 - RNA, 24 nt, Human
ggcgggcagcacccuccgacccuc

SEQ ID NO: 1383101 - RNA, 20 nt, Human
gggacagaggcagauaagaa

SEQ ID NO: 1383102 - RNA, 20 nt, Human
ggucacaggcaaaguccagc

SEQ ID NO: 1383103 - RNA, 21 nt, Human
ggugcgagggccacagcccug

SEQ ID NO: 1383104 - RNA, 18 nt, Human
ggugguuccgccuccagg

SEQ ID NO: 1383105 - RNA, 21 nt, Human
guagcggucgaucaugaaaac

SEQ ID NO: 1383106 - RNA, 21 nt, Human
guccaggcugcuagaggugcu

SEQ ID NO: 1383107 - RNA, 20 nt, Human
guccugacucacacuuacug

SEQ ID NO: 1383108 - RNA, 22 nt, Human
uaaaccacuggucccagagcag

SEQ ID NO: 1383109 - RNA, 23 nt, Human
uacauugagguugugggccuucu

SEQ ID NO: 1383110 - RNA, 19 nt, Human
ucacugccguccucaggug

SEQ ID NO: 1383111 - RNA, 19 nt, Human
uccagcaccaagggcgggc

SEQ ID NO: 1383112 - RNA, 18 nt, Human
ucccagagcagaggaagg

SEQ ID NO: 1383113 - RNA, 20 nt, Human
ucccagagcagaggaaggcu

SEQ ID NO: 1383114 - RNA, 24 nt, Human
uccucagguggguucgggcuucac

SEQ ID NO: 1383115 - RNA, 18 nt, Human
uccucguggugcuccuug

SEQ ID NO: 1383116 - RNA, 24 nt, Human
uccugggucugugucagcgggugc

SEQ ID NO: 1383117 - RNA, 18 nt, Human
ucucacaacgaagcuucu

SEQ ID NO: 1383118 - RNA, 18 nt, Human
ucuguggucacagagggg

SEQ ID NO: 1383119 - RNA, 18 nt, Human
ugaaaaccuuguugcagc

SEQ ID NO: 1383120 - RNA, 22 nt, Human
ugacacagccacugcggagucc

SEQ ID NO: 1383121 - RNA, 18 nt, Human
ugagccggacaccaagcc

SEQ ID NO: 1383122 - RNA, 22 nt, Human
ugagccggacaccaagcccgcc

SEQ ID NO: 1383123 - RNA, 24 nt, Human
ugaggcugacacagccacugcgga

SEQ ID NO: 1383124 - RNA, 25 nt, Human
ugaugugcuucuucauggcguagcg

SEQ ID NO: 1383125 - RNA, 19 nt, Human
ugcacacgaagggugaggc

SEQ ID NO: 1383126 - RNA, 23 nt, Human
ugcacacgaagggugaggcugac

SEQ ID NO: 1383127 - RNA, 21 nt, Human
uggaacccacagaccucacac

SEQ ID NO: 1383128 - RNA, 22 nt, Human
uggcccagguggugguuccgcc

SEQ ID NO: 1383129 - RNA, 23 nt, Human
uggcccagguggugguuccgccu

SEQ ID NO: 1383130 - RNA, 23 nt, Human
uggucacaggcaaaguccagcuc

SEQ ID NO: 1383131 - RNA, 20 nt, Human
uguccugggucugugucagc

SEQ ID NO: 1383132 - RNA, 20 nt, Human
uguugcagccaggguggggg

SEQ ID NO: 1383133 - RNA, 23 nt, Human
uugagguugugggccuucucaaa

SEQ ID NO: 1383134 - RNA, 20 nt, Human
aaggagacccccagggccuu

SEQ ID NO: 1383135 - RNA, 20 nt, Human
acccaccccgcugcacgcgc

SEQ ID NO: 1383136 - RNA, 24 nt, Human
acuccgaaguguacuccagagagg

SEQ ID NO: 1383137 - RNA, 23 nt, Human
acuugcuggggggcugcgugggg

SEQ ID NO: 1383138 - RNA, 18 nt, Human
agacccccagggccuugc

SEQ ID NO: 1383139 - RNA, 20 nt, Human
agaggucccggaauggcagg

SEQ ID NO: 1383140 - RNA, 22 nt, Human
agcuggcccugggauccagagc

SEQ ID NO: 1383141 - RNA, 23 nt, Human
aggagguccuugugaggcucagg

SEQ ID NO: 1383142 - RNA, 18 nt, Human
aggccugggagccuggcg

SEQ ID NO: 1383143 - RNA, 22 nt, Human
aggcuguuucgacgauuccuuc

SEQ ID NO: 1383144 - RNA, 18 nt, Human
agggacuggcaggggcug

SEQ ID NO: 1383145 - RNA, 20 nt, Human
agggacuggcaggggcugcu

SEQ ID NO: 1383146 - RNA, 19 nt, Human
caccccgcugcacgcgcac

SEQ ID NO: 1383147 - RNA, 23 nt, Human
cacgcgcaccgcuuucccgcagc

SEQ ID NO: 1383148 - RNA, 18 nt, Human
cacugaggcgcugcuggc

SEQ ID NO: 1383149 - RNA, 18 nt, Human
cagagggcagcuggcccu

SEQ ID NO: 1383150 - RNA, 22 nt, Human
cagcugcaggugaucucggugg

SEQ ID NO: 1383151 - RNA, 21 nt, Human
caggagguccuugugaggcuc

SEQ ID NO: 1383152 - RNA, 22 nt, Human
caggccagguguuucaggcacc

SEQ ID NO: 1383153 - RNA, 18 nt, Human
cagggcacccaccccgcu

SEQ ID NO: 1383154 - RNA, 23 nt, Human
ccaccccgcugcacgcgcaccgc

SEQ ID NO: 1383155 - RNA, 25 nt, Human
ccccuccucaccagccaggaggucc

SEQ ID NO: 1383156 - RNA, 20 nt, Human
cccugggauccagagcuggg

SEQ ID NO: 1383157 - RNA, 21 nt, Human
cccugugcccgacgcuggccc

SEQ ID NO: 1383158 - RNA, 22 nt, Human
ccgagaccagugggagcugccc

SEQ ID NO: 1383159 - RNA, 21 nt, Human
ccuugccuggacccgagggac

SEQ ID NO: 1383160 - RNA, 20 nt, Human
cgagaccagugggagcugcc

SEQ ID NO: 1383161 - RNA, 21 nt, Human
cgcaccgcuuucccgcagccu

SEQ ID NO: 1383162 - RNA, 18 nt, Human
cgcccgggguuggcugcu

SEQ ID NO: 1383163 - RNA, 19 nt, Human
cgggcacugaggcgcugcu

SEQ ID NO: 1383164 - RNA, 19 nt, Human
cuccucaccagccaggagg

SEQ ID NO: 1383165 - RNA, 23 nt, Human
cugaagacucuguggaggccugg

SEQ ID NO: 1383166 - RNA, 23 nt, Human
cuggcccugggcccugccggaca

SEQ ID NO: 1383167 - RNA, 18 nt, Human
gaccagugggagcugccc

SEQ ID NO: 1383168 - RNA, 20 nt, Human
gaccgggcuggaggugacgu

SEQ ID NO: 1383169 - RNA, 21 nt, Human
gacucuguggaggccugggag

SEQ ID NO: 1383170 - RNA, 18 nt, Human
gacuggcaggggcugcug

SEQ ID NO: 1383171 - RNA, 22 nt, Human
gagcugcccugugcccgacgcu

SEQ ID NO: 1383172 - RNA, 24 nt, Human
gaggugacguuggguggcugcagg

SEQ ID NO: 1383173 - RNA, 21 nt, Human
gauccagagcuggggguggcc

SEQ ID NO: 1383174 - RNA, 20 nt, Human
gcaccgcuuucccgcagccu

SEQ ID NO: 1383175 - RNA, 22 nt, Human
gcacgcgcaccgcuuucccgca

SEQ ID NO: 1383176 - RNA, 19 nt, Human
gcauuuaaggagaccccca

SEQ ID NO: 1383177 - RNA, 21 nt, Human
gcccugggauccagagcuggg

SEQ ID NO: 1383178 - RNA, 24 nt, Human
gcggcuggguguguugccgagacc

SEQ ID NO: 1383179 - RNA, 19 nt, Human
ggacccgagggacuggcag

SEQ ID NO: 1383180 - RNA, 24 nt, Human
ggacgggagggcugacugggaggg

SEQ ID NO: 1383181 - RNA, 20 nt, Human
ggccagguguuucaggcacc

SEQ ID NO: 1383182 - RNA, 18 nt, Human
ggcccugggauccagagc

SEQ ID NO: 1383183 - RNA, 19 nt, Human
ggcuggaggugacguuggg

SEQ ID NO: 1383184 - RNA, 25 nt, Human
gggauguugcugcugcugggagacu

SEQ ID NO: 1383185 - RNA, 19 nt, Human
gggggcugcguccuccggc

SEQ ID NO: 1383186 - RNA, 21 nt, Human
guacuccagagaggucccgga

SEQ ID NO: 1383187 - RNA, 23 nt, Human
guguggccagcugcaggugaucu

SEQ ID NO: 1383188 - RNA, 24 nt, Human
uccagagcuggggguggccgagga

SEQ ID NO: 1383189 - RNA, 18 nt, Human
uccggguuagcuuuauug

SEQ ID NO: 1383190 - RNA, 18 nt, Human
ucgggcacugaggcgcug

SEQ ID NO: 1383191 - RNA, 22 nt, Human
ucuggcgcuguccgcuggucuu

SEQ ID NO: 1383192 - RNA, 21 nt, Human
ucuguggaggccugggagccu

SEQ ID NO: 1383193 - RNA, 19 nt, Human
ugcccgacgcuggcccugg

SEQ ID NO: 1383194 - RNA, 28 nt, Human
ugccuggacccgagggacuggcaggggc

SEQ ID NO: 1383195 - RNA, 24 nt, Human
ugcugcaggcacgggggccugugg

SEQ ID NO: 1383196 - RNA, 19 nt, Human
ugcugggagacuggaccau

SEQ ID NO: 1383197 - RNA, 18 nt, Human
ugcuggggggcugcgugg

SEQ ID NO: 1383198 - RNA, 21 nt, Human
uggaggugacguuggguggcu

SEQ ID NO: 1383199 - RNA, 24 nt, Human
uggcaggggcugcuguugggggau

SEQ ID NO: 1383200 - RNA, 26 nt, Human
uggcaggggcugcuguugggggaugc

SEQ ID NO: 1383201 - RNA, 22 nt, Human
uggcugcaggggccccgaggac

SEQ ID NO: 1383202 - RNA, 23 nt, Human
uggcugcaggggccccgaggacg

SEQ ID NO: 1383203 - RNA, 25 nt, Human
uggcugcaggggccccgaggacggg

SEQ ID NO: 1383204 - RNA, 22 nt, Human
ugggagccuggcgcggcccccu

SEQ ID NO: 1383205 - RNA, 20 nt, Human
ugggaggggcuggaggaagu

SEQ ID NO: 1383206 - RNA, 21 nt, Human
ugggaggggcuggaggaagua

SEQ ID NO: 1383207 - RNA, 21 nt, Human
ugugguguggccagcugcagg

SEQ ID NO: 1383208 - RNA, 23 nt, Human
uguugcugcugcugggagacugg

SEQ ID NO: 1383209 - RNA, 22 nt, Human
uucgacgauuccuucuggcgcu

SEQ ID NO: 1383210 - RNA, 23 nt, Human
uugcuggggggcugcguggggau

SEQ ID NO: 1383211 - RNA, 21 nt, Human
uuuaaggagacccccagggcc

SEQ ID NO: 1383212 - RNA, 19 nt, Human
uuucgacgauuccuucugg

SEQ ID NO: 1383213 - RNA, 21 nt, Human
uuuuuuuuuuuuuugguccgg

SEQ ID NO: 1383214 - RNA, 18 nt, Human
uuuuuuuuuuuuuuuuug

SEQ ID NO: 1383215 - RNA, 18 nt, Human
uuuuuuuuuuuuuuuuug

SEQ ID NO: 1383216 - RNA, 25 nt, Human
uuuuuuuuuuuuuuuuugguccggg

SEQ ID NO: 1383217 - RNA, 22 nt, Human
aaaauucuuuugcccguggcca

SEQ ID NO: 1383218 - RNA, 19 nt, Human
aacauggugaaaccccguc

SEQ ID NO: 1383219 - RNA, 20 nt, Human
aacauggugaaaccccgucu

SEQ ID NO: 1383220 - RNA, 21 nt, Human
aacauggugaaaccccgucuc

SEQ ID NO: 1383221 - RNA, 20 nt, Human
aacauggugaaacccugucu

SEQ ID NO: 1383222 - RNA, 21 nt, Human
aacauggugaaacccugucuc

SEQ ID NO: 1383223 - RNA, 22 nt, Human
aagaacguuccggaagcugggg

SEQ ID NO: 1383224 - RNA, 25 nt, Human
aagaagaagaaaaaaaaguacacaa

SEQ ID NO: 1383225 - RNA, 20 nt, Human
aagaagaagaagaaaaaaaa

SEQ ID NO: 1383226 - RNA, 22 nt, Human
aagaagaagaagaaaaaaaagu

SEQ ID NO: 1383227 - RNA, 19 nt, Human
aauaucuucaaaugaacgg

SEQ ID NO: 1383228 - RNA, 22 nt, Human
accauugcacuccagccugggc

SEQ ID NO: 1383229 - RNA, 24 nt, Human
acccugucucuacuaaaaguacaa

SEQ ID NO: 1383230 - RNA, 18 nt, Human
agaagaaaaaaaaguaca

SEQ ID NO: 1383231 - RNA, 20 nt, Human
agaagaagaagaaaaaaaag

SEQ ID NO: 1383232 - RNA, 24 nt, Human
agcacuuugggaggccgagguggg

SEQ ID NO: 1383233 - RNA, 22 nt, Human
agccuggcuaacauggugaaac

SEQ ID NO: 1383234 - RNA, 24 nt, Human
agccuggcuaacauggugaaaccc

SEQ ID NO: 1383235 - RNA, 19 nt, Human
aggaggagguugcggugag

SEQ ID NO: 1383236 - RNA, 24 nt, Human
aggaggagguugcggugagccaag

SEQ ID NO: 1383237 - RNA, 20 nt, Human
aggcacgggcccugggugug

SEQ ID NO: 1383238 - RNA, 24 nt, Human
aggcacgguggcucaugccuguaa

SEQ ID NO: 1383239 - RNA, 19 nt, Human
aggcagagcuugcagugag

SEQ ID NO: 1383240 - RNA, 20 nt, Human
aggcagagcuugcagugagc

SEQ ID NO: 1383241 - RNA, 24 nt, Human
aggcagagcuugcagugagcagag

SEQ ID NO: 1383242 - RNA, 19 nt, Human
aggccgaggugggggauca

SEQ ID NO: 1383243 - RNA, 23 nt, Human
aggccgaggugggggaucacuug

SEQ ID NO: 1383244 - RNA, 21 nt, Human
aggcgaggggcauccccgggg

SEQ ID NO: 1383245 - RNA, 23 nt, Human
aggcugaggcuggagaaucuauu

SEQ ID NO: 1383246 - RNA, 24 nt, Human
aggcuggagaaucuauugaacccg

SEQ ID NO: 1383247 - RNA, 24 nt, Human
agggacagcaaggcacgggcccug

SEQ ID NO: 1383248 - RNA, 19 nt, Human
agggcugucccugucugcc

SEQ ID NO: 1383249 - RNA, 19 nt, Human
augccuguaaucccagcac

SEQ ID NO: 1383250 - RNA, 24 nt, Human
auugcacuccagccugggcaacaa

SEQ ID NO: 1383251 - RNA, 24 nt, Human
caacauggugaaacccugucucua

SEQ ID NO: 1383252 - RNA, 24 nt, Human
caccauugcacuccagccugggca

SEQ ID NO: 1383253 - RNA, 23 nt, Human
caccuccgggcuccuggagauuu

SEQ ID NO: 1383254 - RNA, 24 nt, Human
cacuccagccugggcaacaagagc

SEQ ID NO: 1383255 - RNA, 25 nt, Human
cacuccagccugggcaacaagagcg

SEQ ID NO: 1383256 - RNA, 24 nt, Human
cagcacuuugggaggccgaggugg

SEQ ID NO: 1383257 - RNA, 20 nt, Human
caugccuguaaucccagcac

SEQ ID NO: 1383258 - RNA, 24 nt, Human
caugccuguaaucccagcacuuug

SEQ ID NO: 1383259 - RNA, 18 nt, Human
cauugcacuccagccugg

SEQ ID NO: 1383260 - RNA, 19 nt, Human
cauugcacuccagccuggg

SEQ ID NO: 1383261 - RNA, 21 nt, Human
cauugcacuccagccugggca

SEQ ID NO: 1383262 - RNA, 23 nt, Human
cauugcacuccagccugggcaac

SEQ ID NO: 1383263 - RNA, 24 nt, Human
cauugcacuccagccugggcaaca

SEQ ID NO: 1383264 - RNA, 22 nt, Human
ccaugccgaagaagaagaagaa

SEQ ID NO: 1383265 - RNA, 20 nt, Human
ccauugcacuccagccuggg

SEQ ID NO: 1383266 - RNA, 21 nt, Human
ccauugcacuccagccugggc

SEQ ID NO: 1383267 - RNA, 23 nt, Human
ccauugcacuccagccugggcaa

SEQ ID NO: 1383268 - RNA, 24 nt, Human
ccauugcacuccagccugggcaac

SEQ ID NO: 1383269 - RNA, 22 nt, Human
cccagccacccgcuaccagaaa

SEQ ID NO: 1383270 - RNA, 24 nt, Human
cccgucucuacugggggugguggc

SEQ ID NO: 1383271 - RNA, 22 nt, Human
cccguggccaacauggugaaac

SEQ ID NO: 1383272 - RNA, 21 nt, Human
cccuggaugggcacuugacuu

SEQ ID NO: 1383273 - RNA, 19 nt, Human
ccgaagaagaagaagaaaa

SEQ ID NO: 1383274 - RNA, 23 nt, Human
ccuggcuaacauggugaaacccc

SEQ ID NO: 1383275 - RNA, 24 nt, Human
ccuggcuaacauggugaaaccccg

SEQ ID NO: 1383276 - RNA, 19 nt, Human
ccuguaaucucagcuacuu

SEQ ID NO: 1383277 - RNA, 21 nt, Human
ccuguaaucucagcuacuugg

SEQ ID NO: 1383278 - RNA, 27 nt, Human
ccugucugccugggucugggggcugca

SEQ ID NO: 1383279 - RNA, 25 nt, Human
cgaaacuccaugccgaagaagaaga

SEQ ID NO: 1383280 - RNA, 23 nt, Human
cgaggugggggaucacuugaggu

SEQ ID NO: 1383281 - RNA, 25 nt, Human
cgaggugggggaucacuugagguca

SEQ ID NO: 1383282 - RNA, 22 nt, Human
cgcccguaaucucagcuacuca

SEQ ID NO: 1383283 - RNA, 24 nt, Human
cgggagcccugugguccguguggc

SEQ ID NO: 1383284 - RNA, 21 nt, Human
cgggaggaggagguugcggug

SEQ ID NO: 1383285 - RNA, 24 nt, Human
cgggaggaggagguugcggugagc

SEQ ID NO: 1383286 - RNA, 24 nt, Human
cguggccaacauggugaaacccug

SEQ ID NO: 1383287 - RNA, 24 nt, Human
cucaugccuguaaucccagcacuu

SEQ ID NO: 1383288 - RNA, 19 nt, Human
cuggagauuugcugugaca

SEQ ID NO: 1383289 - RNA, 21 nt, Human
cuuugggaggccgaggugggg

SEQ ID NO: 1383290 - RNA, 19 nt, Human
gaaacccugucucuacuaa

SEQ ID NO: 1383291 - RNA, 19 nt, Human
gaagaagaagaagaaaaaa

SEQ ID NO: 1383292 - RNA, 22 nt, Human
gaggugggggaucacuugaggu

SEQ ID NO: 1383293 - RNA, 23 nt, Human
gaggugggggaucacuugagguc

SEQ ID NO: 1383294 - RNA, 23 nt, Human
gagguugcggugagccaaguuug

SEQ ID NO: 1383295 - RNA, 18 nt, Human
gaucacuugaggucagga

SEQ ID NO: 1383296 - RNA, 23 nt, Human
gaucacuugaggucaggaguucg

SEQ ID NO: 1383297 - RNA, 24 nt, Human
gaucacuugaggucaggaguucgu

SEQ ID NO: 1383298 - RNA, 20 nt, Human
gcagggacagcaaggcacgg

SEQ ID NO: 1383299 - RNA, 24 nt, Human
gccaacauggugaaacccugucuc

SEQ ID NO: 1383300 - RNA, 20 nt, Human
gccuguaaucucagcuacuu

SEQ ID NO: 1383301 - RNA, 24 nt, Human
gcuaacauggugaaaccccgucuc

SEQ ID NO: 1383302 - RNA, 18 nt, Human
ggagaggcaugaugcccc

SEQ ID NO: 1383303 - RNA, 18 nt, Human
ggagguugcggugagcca

SEQ ID NO: 1383304 - RNA, 20 nt, Human
ggagguugcggugagccaag

SEQ ID NO: 1383305 - RNA, 24 nt, Human
ggagguugcggugagccaaguuug

SEQ ID NO: 1383306 - RNA, 23 nt, Human
ggaucacuugaggucaggaguuc

SEQ ID NO: 1383307 - RNA, 20 nt, Human
ggccgagggcugggaggugc

SEQ ID NO: 1383308 - RNA, 21 nt, Human
ggccgagggcugggaggugca

SEQ ID NO: 1383309 - RNA, 21 nt, Human
ggcucaugccuguaaucccag

SEQ ID NO: 1383310 - RNA, 23 nt, Human
gggagaauggcgugaacccagga

SEQ ID NO: 1383311 - RNA, 24 nt, Human
gggaucacuugaggucaggaguuc

SEQ ID NO: 1383312 - RNA, 21 nt, Human
gggccgagggcugggaggugc

SEQ ID NO: 1383313 - RNA, 19 nt, Human
gggcgcccguaaucucagc

SEQ ID NO: 1383314 - RNA, 24 nt, Human
ggggaucacuugaggucaggaguu

SEQ ID NO: 1383315 - RNA, 23 nt, Human
ggggugguggcauaugccuguaa

SEQ ID NO: 1383316 - RNA, 22 nt, Human
gguccguguggcugggccgagg

SEQ ID NO: 1383317 - RNA, 21 nt, Human
ggugaggcacgguggcucaug

SEQ ID NO: 1383318 - RNA, 24 nt, Human
gguggcauaugccuguaaucucag

SEQ ID NO: 1383319 - RNA, 23 nt, Human
gguggcucaugccuguaauccca

SEQ ID NO: 1383320 - RNA, 24 nt, Human
gguggcucaugccuguaaucccag

SEQ ID NO: 1383321 - RNA, 20 nt, Human
ggugugguggcgggcgcccg

SEQ ID NO: 1383322 - RNA, 21 nt, Human
guugcugagacucgggagccc

SEQ ID NO: 1383323 - RNA, 21 nt, Human
uaaaaguacaaagauuagcug

SEQ ID NO: 1383324 - RNA, 22 nt, Human
uaacauggugaaaccccgucuc

SEQ ID NO: 1383325 - RNA, 24 nt, Human
uaacauggugaaaccccgucucua

SEQ ID NO: 1383326 - RNA, 21 nt, Human
uacacaauucuggugaggcac

SEQ ID NO: 1383327 - RNA, 22 nt, Human
ucaugccuguaaucccagcacu

SEQ ID NO: 1383328 - RNA, 23 nt, Human
uccaugccgaagaagaagaagaa

SEQ ID NO: 1383329 - RNA, 26 nt, Human
uccaugggcaccuccgggcuccugga

SEQ ID NO: 1383330 - RNA, 19 nt, Human
uccccggggaucuuugcgg

SEQ ID NO: 1383331 - RNA, 20 nt, Human
ucucagcuacucagcaggcu

SEQ ID NO: 1383332 - RNA, 22 nt, Human
ucucauauuauuugcccucaac

SEQ ID NO: 1383333 - RNA, 23 nt, Human
ucucuacuaaaaguacaaagauu

SEQ ID NO: 1383334 - RNA, 19 nt, Human
ucuggugaggcacgguggc

SEQ ID NO: 1383335 - RNA, 23 nt, Human
ugaggagggagaauggcgugaac

SEQ ID NO: 1383336 - RNA, 24 nt, Human
ugaggcuggagaaucuauugaacc

SEQ ID NO: 1383337 - RNA, 21 nt, Human
ugaggucaggaguucgugacc

SEQ ID NO: 1383338 - RNA, 21 nt, Human
ugcaccauugcacuccagccu

SEQ ID NO: 1383339 - RNA, 19 nt, Human
ugcacuccagccugggcaa

SEQ ID NO: 1383340 - RNA, 22 nt, Human
ugcacuccagccugggcaacaa

SEQ ID NO: 1383341 - RNA, 21 nt, Human
ugcagggacagcaaggcacgg

SEQ ID NO: 1383342 - RNA, 22 nt, Human
ugccugggucugggggcugcag

SEQ ID NO: 1383343 - RNA, 27 nt, Human
ugccugggucugggggcugcagggaca

SEQ ID NO: 1383344 - RNA, 23 nt, Human
ugccuguaaucccagcacuuugg

SEQ ID NO: 1383345 - RNA, 23 nt, Human
ugccuguaaucccagcacuuugg

SEQ ID NO: 1383346 - RNA, 24 nt, Human
ugccuguaaucccagcacuuuggg

SEQ ID NO: 1383347 - RNA, 23 nt, Human
ugccuguaaucucagcuacuugg

SEQ ID NO: 1383348 - RNA, 24 nt, Human
ugccuguaaucucagcuacuuggg

SEQ ID NO: 1383349 - RNA, 21 nt, Human
ugcgguggcgagugugugcgg

SEQ ID NO: 1383350 - RNA, 21 nt, Human
ugcgguggucagaagggcugu

SEQ ID NO: 1383351 - RNA, 21 nt, Human
uggcauaugccuguaaucuca

SEQ ID NO: 1383352 - RNA, 22 nt, Human
uggcauaugccuguaaucucag

SEQ ID NO: 1383353 - RNA, 20 nt, Human
uggccaacauggugaaaccc

SEQ ID NO: 1383354 - RNA, 20 nt, Human
uggccaacauggugaaaccc

SEQ ID NO: 1383355 - RNA, 23 nt, Human
uggccaacauggugaaacccugu

SEQ ID NO: 1383356 - RNA, 24 nt, Human
uggccaacauggugaaacccuguc

SEQ ID NO: 1383357 - RNA, 22 nt, Human
uggcucaugccuguaaucccag

SEQ ID NO: 1383358 - RNA, 24 nt, Human
uggcucaugccuguaaucccagca

SEQ ID NO: 1383359 - RNA, 20 nt, Human
uggcugggccgagggcuggg

SEQ ID NO: 1383360 - RNA, 23 nt, Human
ugggaggccgaggugggggauca

SEQ ID NO: 1383361 - RNA, 18 nt, Human
ugggaggcugaggaggga

SEQ ID NO: 1383362 - RNA, 18 nt, Human
ugggggugguggcauaug

SEQ ID NO: 1383363 - RNA, 24 nt, Human
ugguggcauaugccuguaaucuca

SEQ ID NO: 1383364 - RNA, 20 nt, Human
ugucccugucugccuggguc

SEQ ID NO: 1383365 - RNA, 22 nt, Human
uguccgaaagaacguuccggaa

SEQ ID NO: 1383366 - RNA, 18 nt, Human
uuagcugggugugguggc

SEQ ID NO: 1383367 - RNA, 24 nt, Human
uuagcugggugugguggcgggcgc

SEQ ID NO: 1383368 - RNA, 23 nt, Human
uugcaccauugcacuccagccug

SEQ ID NO: 1383369 - RNA, 22 nt, Human
uugcggugagccaaguuugcac

SEQ ID NO: 1383370 - RNA, 24 nt, Human
uugggaggccgaggugggggauca

SEQ ID NO: 1383371 - RNA, 24 nt, Human
uuugcaccauugcacuccagccug

SEQ ID NO: 1383372 - RNA, 21 nt, Human
uuugcugugacagccaugagg

SEQ ID NO: 1383373 - RNA, 23 nt, Human
uuuguggucucauauuauuugcc

SEQ ID NO: 1383374 - RNA, 19 nt, Human
aaaaaaaaaaaaagacaag

SEQ ID NO: 1383375 - RNA, 26 nt, Human
aaaaaaaagacaaguauugguaagga

SEQ ID NO: 1383376 - RNA, 22 nt, Human
aaaaaaagacaaguauugguaa

SEQ ID NO: 1383377 - RNA, 24 nt, Human
aaaacaccaaaagcaauggaaaca

SEQ ID NO: 1383378 - RNA, 23 nt, Human
aaaaugaacuagaaacuugaaua

SEQ ID NO: 1383379 - RNA, 19 nt, Human
aaacaaaagccaaaauuga

SEQ ID NO: 1383380 - RNA, 20 nt, Human
aaacaaaagccaaaauugac

SEQ ID NO: 1383381 - RNA, 22 nt, Human
aaacaaaagccaaaauugacaa

SEQ ID NO: 1383382 - RNA, 27 nt, Human
aaacuaccaucagagugaacaggcaag

SEQ ID NO: 1383383 - RNA, 21 nt, Human
aaagcaauggaaacaaaagcc

SEQ ID NO: 1383384 - RNA, 23 nt, Human
aaagcaauggaaacaaaagccaa

SEQ ID NO: 1383385 - RNA, 19 nt, Human
aaaguccaaugucauuagu

SEQ ID NO: 1383386 - RNA, 24 nt, Human
aacaacucaauagcaaaaagcaaa

SEQ ID NO: 1383387 - RNA, 21 nt, Human
aacccuagaagaaaaccuagg

SEQ ID NO: 1383388 - RNA, 21 nt, Human
aaccuacaaaaugggagaaaa

SEQ ID NO: 1383389 - RNA, 19 nt, Human
aagaaacaacacaaaagca

SEQ ID NO: 1383390 - RNA, 19 nt, Human
aagcaauggaaacaaaagc

SEQ ID NO: 1383391 - RNA, 22 nt, Human
aagcaauggaaacaaaagccaa

SEQ ID NO: 1383392 - RNA, 23 nt, Human
aagcaauggaaacaaaagccaaa

SEQ ID NO: 1383393 - RNA, 24 nt, Human
aauuauuuauuuuauuauuauuau

SEQ ID NO: 1383394 - RNA, 18 nt, Human
acaaaauaugaaacaaaa

SEQ ID NO: 1383395 - RNA, 20 nt, Human
acaacacaaaagcaacuuac

SEQ ID NO: 1383396 - RNA, 24 nt, Human
acagcaaaagaaacuaccaucaga

SEQ ID NO: 1383397 - RNA, 19 nt, Human
acagcuaugggaaaaagua

SEQ ID NO: 1383398 - RNA, 25 nt, Human
accugugccaugcuggugugcugca

SEQ ID NO: 1383399 - RNA, 18 nt, Human
agaaacaacacaaaagca

SEQ ID NO: 1383400 - RNA, 24 nt, Human
agagugaacaggcaaccuacaaaa

SEQ ID NO: 1383401 - RNA, 21 nt, Human
agcaaaaagcaaauaauccaa

SEQ ID NO: 1383402 - RNA, 24 nt, Human
agcaauggaaacaaaagccaaaaa

SEQ ID NO: 1383403 - RNA, 21 nt, Human
aggccgagguagguggaucac

SEQ ID NO: 1383404 - RNA, 22 nt, Human
aggccgggugcgguggcccaug

SEQ ID NO: 1383405 - RNA, 22 nt, Human
agguagguggaucaccugaggu

SEQ ID NO: 1383406 - RNA, 26 nt, Human
agguagguggaucaccugaggucagg

SEQ ID NO: 1383407 - RNA, 22 nt, Human
agguggaaaugcaaaaugguac

SEQ ID NO: 1383408 - RNA, 22 nt, Human
agguggaucaccugaggucagg

SEQ ID NO: 1383409 - RNA, 27 nt, Human
augaaacaaaaauauaagaaucccauu

SEQ ID NO: 1383410 - RNA, 21 nt, Human
augucuaaaacaccaaaagca

SEQ ID NO: 1383411 - RNA, 22 nt, Human
caaaagccaaaauugacaaaug

SEQ ID NO: 1383412 - RNA, 20 nt, Human
caaaauggauuaaagacuua

SEQ ID NO: 1383413 - RNA, 24 nt, Human
caaaauggauuaaagacuuaaacg

SEQ ID NO: 1383414 - RNA, 24 nt, Human
caaaugggaucuaauuaaacuaaa

SEQ ID NO: 1383415 - RNA, 21 nt, Human
caacacuuugagaggccgagg

SEQ ID NO: 1383416 - RNA, 21 nt, Human
caacucaauagcaaaaagcaa

SEQ ID NO: 1383417 - RNA, 24 nt, Human
caaggacuucaugucuaaaacacc

SEQ ID NO: 1383418 - RNA, 21 nt, Human
caauggaaacaaaagccaaaa

SEQ ID NO: 1383419 - RNA, 22 nt, Human
cacaacaguccccagaguguga

SEQ ID NO: 1383420 - RNA, 22 nt, Human
cagcaaaagaaacuaccaucag

SEQ ID NO: 1383421 - RNA, 22 nt, Human
cagggaaaugcaaaucaaaacu

SEQ ID NO: 1383422 - RNA, 25 nt, Human
cauaaaaacccuagaagaaaaccua

SEQ ID NO: 1383423 - RNA, 25 nt, Human
cauacagguggccagcagauauaua

SEQ ID NO: 1383424 - RNA, 24 nt, Human
caugcuuguaacuccaacacuuug

SEQ ID NO: 1383425 - RNA, 18 nt, Human
caugugcagaaugugcag

SEQ ID NO: 1383426 - RNA, 19 nt, Human
ccaggauggcuauuaaaaa

SEQ ID NO: 1383427 - RNA, 26 nt, Human
ccccauuucuuuauauucaacugaau

SEQ ID NO: 1383428 - RNA, 18 nt, Human
cccccacaacagucccca

SEQ ID NO: 1383429 - RNA, 25 nt, Human
cccccacaacaguccccagagugug

SEQ ID NO: 1383430 - RNA, 19 nt, Human
cccccaucuccccccccca

SEQ ID NO: 1383431 - RNA, 21 nt, Human
cccccaucucccccccccaca

SEQ ID NO: 1383432 - RNA, 23 nt, Human
ccccccacaacaguccccagagu

SEQ ID NO: 1383433 - RNA, 22 nt, Human
ccccccccacaacaguccccag

SEQ ID NO: 1383434 - RNA, 23 nt, Human
cccucccccaucuccccccccca

SEQ ID NO: 1383435 - RNA, 23 nt, Human
ccucccccaucucccccccccaa

SEQ ID NO: 1383436 - RNA, 21 nt, Human
ccugaggucaggagucgagac

SEQ ID NO: 1383437 - RNA, 20 nt, Human
cgagguagguggaucaccug

SEQ ID NO: 1383438 - RNA, 24 nt, Human
cgagguagguggaucaccugaggu

SEQ ID NO: 1383439 - RNA, 26 nt, Human
cgagguagguggaucaccugagguca

SEQ ID NO: 1383440 - RNA, 18 nt, Human
cuaaaaccauaaaaaccc

SEQ ID NO: 1383441 - RNA, 19 nt, Human
cuaaaaccauaaaaacccu

SEQ ID NO: 1383442 - RNA, 19 nt, Human
cucaaacaacucaauagca

SEQ ID NO: 1383443 - RNA, 20 nt, Human
cuccaacacuuugagaggcc

SEQ ID NO: 1383444 - RNA, 21 nt, Human
cucccccccccacaacagucc

SEQ ID NO: 1383445 - RNA, 23 nt, Human
cuccuaaugcuaucccuccccca

SEQ ID NO: 1383446 - RNA, 24 nt, Human
cugcacccauuaacucgucauuua

SEQ ID NO: 1383447 - RNA, 25 nt, Human
gaaaaaguacaaaguuuccucaaaa

SEQ ID NO: 1383448 - RNA, 23 nt, Human
gaaacuaccaucagagugaacag

SEQ ID NO: 1383449 - RNA, 19 nt, Human
gaccuaaaaccauaaaaac

SEQ ID NO: 1383450 - RNA, 23 nt, Human
gagguagguggaucaccugaggu

SEQ ID NO: 1383451 - RNA, 18 nt, Human
gauaaggaacucaaacaa

SEQ ID NO: 1383452 - RNA, 19 nt, Human
gauauauaaaaaaaagucc

SEQ ID NO: 1383453 - RNA, 23 nt, Human
gaucaccugaggucaggagucga

SEQ ID NO: 1383454 - RNA, 24 nt, Human
gauguuucuccaaagaagacauac

SEQ ID NO: 1383455 - RNA, 19 nt, Human
gcaauggaaacaaaagcca

SEQ ID NO: 1383456 - RNA, 20 nt, Human
ggcuauuaaaaaaaaaaaaa

SEQ ID NO: 1383457 - RNA, 24 nt, Human
gggugcgguggcccaugcuuguaa

SEQ ID NO: 1383458 - RNA, 20 nt, Human
uaaaacaccaaaagcaaugg

SEQ ID NO: 1383459 - RNA, 21 nt, Human
uaagaaacaacacaaaagcaa

SEQ ID NO: 1383460 - RNA, 19 nt, Human
uaagauagcuaauuucaug

SEQ ID NO: 1383461 - RNA, 21 nt, Human
uacaagaaaaaaacaaacaac

SEQ ID NO: 1383462 - RNA, 26 nt, Human
uaccugugccaugcuggugugcugca

SEQ ID NO: 1383463 - RNA, 20 nt, Human
uagcaaaaagcaaauaaucc

SEQ ID NO: 1383464 - RNA, 24 nt, Human
uagguggaucaccugaggucagga

SEQ ID NO: 1383465 - RNA, 24 nt, Human
uaucaccuuacaucugccaggaug

SEQ ID NO: 1383466 - RNA, 19 nt, Human
uauccagaaucuacaauga

SEQ ID NO: 1383467 - RNA, 22 nt, Human
uaucccucccccaucucccccc

SEQ ID NO: 1383468 - RNA, 25 nt, Human
ucaaaauagauaaggaacucaaaca

SEQ ID NO: 1383469 - RNA, 20 nt, Human
ucacaaguuggccuuuuuuu

SEQ ID NO: 1383470 - RNA, 23 nt, Human
ucccccaucucccccccccacaa

SEQ ID NO: 1383471 - RNA, 25 nt, Human
uccuaaugcuaucccucccccaucu

SEQ ID NO: 1383472 - RNA, 23 nt, Human
ucuccuaaugcuaucccuccccc

SEQ ID NO: 1383473 - RNA, 24 nt, Human
ucugacaaagggcuaauauccaga

SEQ ID NO: 1383474 - RNA, 22 nt, Human
ucugcacagcaaaagaaacuac

SEQ ID NO: 1383475 - RNA, 18 nt, Human
ugaaauaucaccuuacau

SEQ ID NO: 1383476 - RNA, 22 nt, Human
ugaacaggcaaccuacaaaaug

SEQ ID NO: 1383477 - RNA, 19 nt, Human
ugacaaagggcuaauaucc

SEQ ID NO: 1383478 - RNA, 18 nt, Human
ugacauauguauaccugu

SEQ ID NO: 1383479 - RNA, 19 nt, Human
ugagaggccgagguaggug

SEQ ID NO: 1383480 - RNA, 24 nt, Human
ugagaggccgagguagguggauca

SEQ ID NO: 1383481 - RNA, 23 nt, Human
ugcuggugugcugcacccauuaa

SEQ ID NO: 1383482 - RNA, 18 nt, Human
uggagaaacuggaacucu

SEQ ID NO: 1383483 - RNA, 23 nt, Human
uggaucaccugaggucaggaguc

SEQ ID NO: 1383484 - RNA, 27 nt, Human
uggaucaccugaggucaggagucgaga

SEQ ID NO: 1383485 - RNA, 23 nt, Human
uggcccaugcuuguaacuccaac

SEQ ID NO: 1383486 - RNA, 22 nt, Human
ugggagaaaauuuucgcaaccu

SEQ ID NO: 1383487 - RNA, 22 nt, Human
ugucauaagaaacaacacaaaa

SEQ ID NO: 1383488 - RNA, 19 nt, Human
ugucuaaaacaccaaaagc

SEQ ID NO: 1383489 - RNA, 19 nt, Human
ugugcagaaugugcagguu

SEQ ID NO: 1383490 - RNA, 22 nt, Human
uguggagaaacuggaacucuug

SEQ ID NO: 1383491 - RNA, 21 nt, Human
uucaaaauagauaaggaacuc

SEQ ID NO: 1383492 - RNA, 25 nt, Human
uucaggacauaggcaugggcaagga

SEQ ID NO: 1383493 - RNA, 22 nt, Human
uucgcaaccuacucaucugacc

SEQ ID NO: 1383494 - RNA, 21 nt, Human
uugaauagauguuucuccaaa

SEQ ID NO: 1383495 - RNA, 27 nt, Human
caggauugggacuuuccccugaggccu

SEQ ID NO: 1383496 - RNA, 22 nt, Human
cuccuccaagcuguggccucaa

SEQ ID NO: 1383497 - RNA, 19 nt, Human
uaagagagauugugucagg

SEQ ID NO: 1383498 - RNA, 26 nt, Human
ugggagggucccucaggauugggacu

SEQ ID NO: 1383499 - RNA, 22 nt, Human
uuccccugaggccucuaggcuc

SEQ ID NO: 1383500 - RNA, 19 nt, Human
aaauucuaacaugcucuuc

SEQ ID NO: 1383501 - RNA, 24 nt, Human
aaggcaaaauauguuuauuacaga

SEQ ID NO: 1383502 - RNA, 18 nt, Human
aggcaacaugagaucaac

SEQ ID NO: 1383503 - RNA, 19 nt, Human
caacaugagaucaaccauu

SEQ ID NO: 1383504 - RNA, 23 nt, Human
caauuaccgagccaacauucagc

SEQ ID NO: 1383505 - RNA, 18 nt, Human
cccgggaggaagcucugg

SEQ ID NO: 1383506 - RNA, 20 nt, Human
ccgccggcagcgccucuucu

SEQ ID NO: 1383507 - RNA, 19 nt, Human
ccggagggaccggcuggca

SEQ ID NO: 1383508 - RNA, 20 nt, Human
cgggaggaagcucuggagcg

SEQ ID NO: 1383509 - RNA, 21 nt, Human
cuccgcggcccggccguccgc

SEQ ID NO: 1383510 - RNA, 19 nt, Human
cuggagcggccgcuccucu

SEQ ID NO: 1383511 - RNA, 27 nt, Human
gaccggcuggcaggcgggucggacccc

SEQ ID NO: 1383512 - RNA, 19 nt, Human
gcaggcggguggggguggc

SEQ ID NO: 1383513 - RNA, 20 nt, Human
gccccgggaggaagcucugg

SEQ ID NO: 1383514 - RNA, 18 nt, Human
ggguggggguggcggugg

SEQ ID NO: 1383515 - RNA, 24 nt, Human
ucaauuaccgagccaacauucagc

SEQ ID NO: 1383516 - RNA, 18 nt, Human
ugaaguguagcuuugaaa

SEQ ID NO: 1383517 - RNA, 18 nt, Human
ugaggggggcgccccggg

SEQ ID NO: 1383518 - RNA, 19 nt, Human
ugaggggggcgccccggga

SEQ ID NO: 1383519 - RNA, 24 nt, Human
uuaaaguaagcaaggcaacaugag

SEQ ID NO: 1383520 - RNA, 22 nt, Human
aaauggaacaauauauugcaaa

SEQ ID NO: 1383521 - RNA, 18 nt, Human
aacagcgacgccgccccc

SEQ ID NO: 1383522 - RNA, 22 nt, Human
aaccaaaaaggacugauucagg

SEQ ID NO: 1383523 - RNA, 19 nt, Human
aagaaacacugaaccaaca

SEQ ID NO: 1383524 - RNA, 20 nt, Human
aagcaacauuaguccaaaca

SEQ ID NO: 1383525 - RNA, 22 nt, Human
aauaaaauggagaguaccuuga

SEQ ID NO: 1383526 - RNA, 23 nt, Human
aauuacuguaagagucuccaaau

SEQ ID NO: 1383527 - RNA, 21 nt, Human
accccgcccccgucccccuca

SEQ ID NO: 1383528 - RNA, 19 nt, Human
agaaaaaugugcuucugga

SEQ ID NO: 1383529 - RNA, 20 nt, Human
agcaaaaugcaaaggcugua

SEQ ID NO: 1383530 - RNA, 23 nt, Human
agcaugccaaaugugcagcuauc

SEQ ID NO: 1383531 - RNA, 22 nt, Human
aggaaacaauucauaucuucac

SEQ ID NO: 1383532 - RNA, 25 nt, Human
auuauccacuaaaauaucuauuaac

SEQ ID NO: 1383533 - RNA, 21 nt, Human
caaaaaggacugauucaggua

SEQ ID NO: 1383534 - RNA, 22 nt, Human
caaaauggaaucaaaagaaauu

SEQ ID NO: 1383535 - RNA, 18 nt, Human
caaagcuuuugucugcau

SEQ ID NO: 1383536 - RNA, 18 nt, Human
caaauguaaucaagugaa

SEQ ID NO: 1383537 - RNA, 22 nt, Human
caaauguaaucaagugaacaag

SEQ ID NO: 1383538 - RNA, 22 nt, Human
caagugaacaagaauaccagaa

SEQ ID NO: 1383539 - RNA, 22 nt, Human
caauacaacucaauuaagagua

SEQ ID NO: 1383540 - RNA, 19 nt, Human
caccccgcccccguccccc

SEQ ID NO: 1383541 - RNA, 24 nt, Human
caccccgcccccgucccccucacc

SEQ ID NO: 1383542 - RNA, 26 nt, Human
caccccgcccccgucccccucacccu

SEQ ID NO: 1383543 - RNA, 26 nt, Human
cagcuaucagucugcuugccaucagg

SEQ ID NO: 1383544 - RNA, 23 nt, Human
ccaagacucugaugccccagugg

SEQ ID NO: 1383545 - RNA, 21 nt, Human
cccagccaagacucugaugcc

SEQ ID NO: 1383546 - RNA, 19 nt, Human
cccaugggcucaauauagg

SEQ ID NO: 1383547 - RNA, 23 nt, Human
ccccaccccgcccccgucccccu

SEQ ID NO: 1383548 - RNA, 24 nt, Human
ccccaguggaaaucacuacucuuc

SEQ ID NO: 1383549 - RNA, 22 nt, Human
cccccaccccgcccccgucccc

SEQ ID NO: 1383550 - RNA, 18 nt, Human
cccccgucccccucaccc

SEQ ID NO: 1383551 - RNA, 24 nt, Human
cccgcggcuuaaaagggccggggc

SEQ ID NO: 1383552 - RNA, 29 nt, Human
ccgccgucacggccgcgaccgccccgcgg

SEQ ID NO: 1383553 - RNA, 22 nt, Human
ccuaaagccucaacuucaguag

SEQ ID NO: 1383554 - RNA, 27 nt, Human
cggcaggaggcggcggccccgcggcca

SEQ ID NO: 1383555 - RNA, 22 nt, Human
cggcguguggcggccugggugg

SEQ ID NO: 1383556 - RNA, 20 nt, Human
cgggaggggcgcggaagggg

SEQ ID NO: 1383557 - RNA, 20 nt, Human
cucuuaaccaaaauggaauc

SEQ ID NO: 1383558 - RNA, 18 nt, Human
cugaaccaacaagcagca

SEQ ID NO: 1383559 - RNA, 21 nt, Human
cugcuggaaaauggcgagggg

SEQ ID NO: 1383560 - RNA, 20 nt, Human
cuuccuuuguaaccgacucc

SEQ ID NO: 1383561 - RNA, 19 nt, Human
gaaagggcugcccccaccc

SEQ ID NO: 1383562 - RNA, 18 nt, Human
gaccgccccgcggggccg

SEQ ID NO: 1383563 - RNA, 23 nt, Human
gcaaaaugcaaaggcuguaacuu

SEQ ID NO: 1383564 - RNA, 18 nt, Human
gcaugccaaaugugcagc

SEQ ID NO: 1383565 - RNA, 23 nt, Human
gcccugcgcgcuccgguuucagc

SEQ ID NO: 1383566 - RNA, 21 nt, Human
gcugcuggaaaauggcgaggg

SEQ ID NO: 1383567 - RNA, 20 nt, Human
ggcggccccgcggcuuaaaa

SEQ ID NO: 1383568 - RNA, 19 nt, Human
gggcugcccccaccccgcc

SEQ ID NO: 1383569 - RNA, 22 nt, Human
gguaaggcaauaaaauggagag

SEQ ID NO: 1383570 - RNA, 18 nt, Human
guaaggcaauaaaaugga

SEQ ID NO: 1383571 - RNA, 21 nt, Human
uaaacaaagcaugccaaaugu

SEQ ID NO: 1383572 - RNA, 21 nt, Human
uaaggcaauaaaauggagagu

SEQ ID NO: 1383573 - RNA, 24 nt, Human
uacaaaguuaaaaacugaaucuca

SEQ ID NO: 1383574 - RNA, 26 nt, Human
uacccuaaagccucaacuucaguagc

SEQ ID NO: 1383575 - RNA, 23 nt, Human
uaguccaaacauacaacagucaa

SEQ ID NO: 1383576 - RNA, 18 nt, Human
uaucaggaaaaauacagu

SEQ ID NO: 1383577 - RNA, 27 nt, Human
uaucaggaaaaauacaguaaaggcccc

SEQ ID NO: 1383578 - RNA, 22 nt, Human
uauugcaaauccuuguaaccca

SEQ ID NO: 1383579 - RNA, 19 nt, Human
ucaaagcuuuugucugcau

SEQ ID NO: 1383580 - RNA, 18 nt, Human
uccaagauaucuaaaauc

SEQ ID NO: 1383581 - RNA, 25 nt, Human
ucuauuaccaaccaaaaaggacuga

SEQ ID NO: 1383582 - RNA, 26 nt, Human
ucucuuaaccaaaauggaaucaaaag

SEQ ID NO: 1383583 - RNA, 18 nt, Human
ugaaccaacaagcagcag

SEQ ID NO: 1383584 - RNA, 23 nt, Human
ugaaccaacaagcagcagauuca

SEQ ID NO: 1383585 - RNA, 22 nt, Human
ugcagaaaaaugugcuucugga

SEQ ID NO: 1383586 - RNA, 21 nt, Human
uggaaucaaaagaaauuaaac

SEQ ID NO: 1383587 - RNA, 20 nt, Human
uggcaauaucauaaaauggu

SEQ ID NO: 1383588 - RNA, 23 nt, Human
uggcaauaucauaaaaugguuuu

SEQ ID NO: 1383589 - RNA, 18 nt, Human
uggcggccuggguggcgc

SEQ ID NO: 1383590 - RNA, 22 nt, Human
uggguguauaaaaaaaucuauu

SEQ ID NO: 1383591 - RNA, 28 nt, Human
uguacuguggcucuuguuccgguucccc

SEQ ID NO: 1383592 - RNA, 24 nt, Human
uuaaaaacugaaucucaaagcuaa

SEQ ID NO: 1383593 - RNA, 22 nt, Human
uugugcagaaaaaugugcuucu

SEQ ID NO: 1383594 - RNA, 19 nt, Human
uuuccuaucacauuuuggc

SEQ ID NO: 1383595 - RNA, 22 nt, Human
aaaauuuuuaacauaccaagug

SEQ ID NO: 1383596 - RNA, 18 nt, Human
aacagcauuagcaacacu

SEQ ID NO: 1383597 - RNA, 19 nt, Human
aagaaaagcaauaaaaaug

SEQ ID NO: 1383598 - RNA, 23 nt, Human
aagcagaggccaggccaaugaaa

SEQ ID NO: 1383599 - RNA, 25 nt, Human
aagcagaggccaggccaaugaaaaa

SEQ ID NO: 1383600 - RNA, 24 nt, Human
aagcagggagacuuaguuguagga

SEQ ID NO: 1383601 - RNA, 22 nt, Human
aaggaggcacaaagaaggaaca

SEQ ID NO: 1383602 - RNA, 21 nt, Human
agccugagaagcagaggccag

SEQ ID NO: 1383603 - RNA, 25 nt, Human
caaaauuagaaagcagaaaacuaau

SEQ ID NO: 1383604 - RNA, 19 nt, Human
cacacaaugcacaaaggaa

SEQ ID NO: 1383605 - RNA, 19 nt, Human
caccaguaaggggccucca

SEQ ID NO: 1383606 - RNA, 21 nt, Human
cagaggccaggccaaugaaaa

SEQ ID NO: 1383607 - RNA, 21 nt, Human
caggccaaugaaaaaccagcc

SEQ ID NO: 1383608 - RNA, 25 nt, Human
caggccaaugaaaaaccagccacga

SEQ ID NO: 1383609 - RNA, 21 nt, Human
ccacacuuaagaaaauacuag

SEQ ID NO: 1383610 - RNA, 26 nt, Human
cccaacauguguaacaaaguaggauu

SEQ ID NO: 1383611 - RNA, 21 nt, Human
ccugaaaggcuacaaaccucu

SEQ ID NO: 1383612 - RNA, 18 nt, Human
cucaaagaaaggagucac

SEQ ID NO: 1383613 - RNA, 22 nt, Human
cugucucuuacccaucuuuccc

SEQ ID NO: 1383614 - RNA, 20 nt, Human
gaaaugaauaggagcaggca

SEQ ID NO: 1383615 - RNA, 22 nt, Human
gagcaaaagaaauaaucaguua

SEQ ID NO: 1383616 - RNA, 22 nt, Human
gggccuccaacccugacccuca

SEQ ID NO: 1383617 - RNA, 18 nt, Human
gugguugcaaagcuaucc

SEQ ID NO: 1383618 - RNA, 19 nt, Human
uaacaaaguaggauccccc

SEQ ID NO: 1383619 - RNA, 26 nt, Human
uaagaaaagcaauaaaaauguaaaga

SEQ ID NO: 1383620 - RNA, 18 nt, Human
uaagacuauaagaaauau

SEQ ID NO: 1383621 - RNA, 24 nt, Human
uaaggggccuccaacccugacccu

SEQ ID NO: 1383622 - RNA, 24 nt, Human
uacacaauuucuauauuguauuaa

SEQ ID NO: 1383623 - RNA, 19 nt, Human
uaccaagugccucaagagu

SEQ ID NO: 1383624 - RNA, 27 nt, Human
uagaaagcagaaaacuaguucgguuga

SEQ ID NO: 1383625 - RNA, 24 nt, Human
uaggaucccccuguaaaaccacca

SEQ ID NO: 1383626 - RNA, 18 nt, Human
uaguaaguaaauguguga

SEQ ID NO: 1383627 - RNA, 24 nt, Human
uauuaaagauccugauugaccaaa

SEQ ID NO: 1383628 - RNA, 23 nt, Human
uccccugaagacaucuuagacac

SEQ ID NO: 1383629 - RNA, 23 nt, Human
ucuuacccaucuuuccccugaag

SEQ ID NO: 1383630 - RNA, 20 nt, Human
ugaaaaaccagccacgagag

SEQ ID NO: 1383631 - RNA, 23 nt, Human
ugguuuggaaggaggcacaaaga

SEQ ID NO: 1383632 - RNA, 21 nt, Human
uucacagggacacagcuuaug

SEQ ID NO: 1383633 - RNA, 18 nt, Human
uuccugaaaauaaaaaau

SEQ ID NO: 1383634 - RNA, 20 nt, Human
aaaacaagcccacaaggaaa

SEQ ID NO: 1383635 - RNA, 26 nt, Human
aaacaggagacuggcacugcccaaag

SEQ ID NO: 1383636 - RNA, 23 nt, Human
aaaggaacaaaggccccgauuca

SEQ ID NO: 1383637 - RNA, 20 nt, Human
aacaggaauaaagaaaucug

SEQ ID NO: 1383638 - RNA, 19 nt, Human
aacauggcauuuucuggac

SEQ ID NO: 1383639 - RNA, 22 nt, Human
aacauggcauuuucuggacaca

SEQ ID NO: 1383640 - RNA, 19 nt, Human
aacccagacacccaggccu

SEQ ID NO: 1383641 - RNA, 25 nt, Human
aaguacuccucccaccucagccuuc

SEQ ID NO: 1383642 - RNA, 26 nt, Human
acaccccauuucacaacccagacacc

SEQ ID NO: 1383643 - RNA, 19 nt, Human
acaugcagaggagcugcuc

SEQ ID NO: 1383644 - RNA, 23 nt, Human
acccugggucuaucagaccucag

SEQ ID NO: 1383645 - RNA, 20 nt, Human
acgucccacaggguggagcc

SEQ ID NO: 1383646 - RNA, 19 nt, Human
acuauaaugaaggcagaau

SEQ ID NO: 1383647 - RNA, 25 nt, Human
acucuguugcccaggcuggagugca

SEQ ID NO: 1383648 - RNA, 21 nt, Human
acugcaacauaacuuagccca

SEQ ID NO: 1383649 - RNA, 25 nt, Human
agcagaaaaggaacaaaggccccga

SEQ ID NO: 1383650 - RNA, 22 nt, Human
agcaggaaucccagauccaggc

SEQ ID NO: 1383651 - RNA, 20 nt, Human
agcaugagaaauaaaacuuc

SEQ ID NO: 1383652 - RNA, 23 nt, Human
agccaccgggaaagccacccauc

SEQ ID NO: 1383653 - RNA, 21 nt, Human
agcccacaaggaaauacugcc

SEQ ID NO: 1383654 - RNA, 25 nt, Human
agcguucuucguuugcuuuuuuaga

SEQ ID NO: 1383655 - RNA, 21 nt, Human
aggaaauacugccgucuccau

SEQ ID NO: 1383656 - RNA, 19 nt, Human
aggaagcugaggcugagac

SEQ ID NO: 1383657 - RNA, 24 nt, Human
aggagacaccccauuucacaaccc

SEQ ID NO: 1383658 - RNA, 19 nt, Human
aggccuagugaagccgggc

SEQ ID NO: 1383659 - RNA, 19 nt, Human
aggcuggagugcaguggca

SEQ ID NO: 1383660 - RNA, 21 nt, Human
aggguggagccuccaucugcc

SEQ ID NO: 1383661 - RNA, 19 nt, Human
aggugcaaaccaccaugcc

SEQ ID NO: 1383662 - RNA, 21 nt, Human
agugcaguggcacaaucauag

SEQ ID NO: 1383663 - RNA, 23 nt, Human
agugcaguggcacaaucauaguu

SEQ ID NO: 1383664 - RNA, 18 nt, Human
auaguucacuguaaccuc

SEQ ID NO: 1383665 - RNA, 18 nt, Human
aucauaguucacuguaac

SEQ ID NO: 1383666 - RNA, 24 nt, Human
auguagcaugagaaauaaaacuuc

SEQ ID NO: 1383667 - RNA, 19 nt, Human
auuucacaacccagacacc

SEQ ID NO: 1383668 - RNA, 20 nt, Human
caaagcccuucuccuagcaa

SEQ ID NO: 1383669 - RNA, 24 nt, Human
caacuucugcugcuuuauugaagg

SEQ ID NO: 1383670 - RNA, 22 nt, Human
cacaacccagacacccaggccu

SEQ ID NO: 1383671 - RNA, 22 nt, Human
cacagccaggaagcaggaaucc

SEQ ID NO: 1383672 - RNA, 22 nt, Human
cacaggugcaaaccaccaugcc

SEQ ID NO: 1383673 - RNA, 20 nt, Human
caccucagccuucugaguag

SEQ ID NO: 1383674 - RNA, 24 nt, Human
cacucuguugcccaggcuggagug

SEQ ID NO: 1383675 - RNA, 19 nt, Human
cacugcaauagcucauagu

SEQ ID NO: 1383676 - RNA, 21 nt, Human
cacugcgugacacugguagau

SEQ ID NO: 1383677 - RNA, 19 nt, Human
cagaaggagaaaucugacu

SEQ ID NO: 1383678 - RNA, 24 nt, Human
cagaaugaacuuaaccuccacuaa

SEQ ID NO: 1383679 - RNA, 21 nt, Human
cagagcagcaagagccuccag

SEQ ID NO: 1383680 - RNA, 18 nt, Human
cagcagaaaaggaacaaa

SEQ ID NO: 1383681 - RNA, 24 nt, Human
cagcagaaaaggaacaaaggcccc

SEQ ID NO: 1383682 - RNA, 21 nt, Human
caggccuagugaagccgggcu

SEQ ID NO: 1383683 - RNA, 22 nt, Human
caggccuagugaagccgggcuu

SEQ ID NO: 1383684 - RNA, 18 nt, Human
caggggcucugagaaccc

SEQ ID NO: 1383685 - RNA, 19 nt, Human
cagguguuacugcaaacag

SEQ ID NO: 1383686 - RNA, 22 nt, Human
cauaagacgccauugcacccac

SEQ ID NO: 1383687 - RNA, 21 nt, Human
caucuucucugccacacagcc

SEQ ID NO: 1383688 - RNA, 21 nt, Human
cauguagcaugagaaauaaaa

SEQ ID NO: 1383689 - RNA, 22 nt, Human
cauguuacugauguagcucuuc

SEQ ID NO: 1383690 - RNA, 20 nt, Human
ccacaggugcaaaccaccau

SEQ ID NO: 1383691 - RNA, 21 nt, Human
ccacaugcagaggagcugcuc

SEQ ID NO: 1383692 - RNA, 23 nt, Human
ccaccucagccuucugaguagcu

SEQ ID NO: 1383693 - RNA, 19 nt, Human
ccaggaagcaggaauccca

SEQ ID NO: 1383694 - RNA, 25 nt, Human
ccaucugccaggggcucugagaacc

SEQ ID NO: 1383695 - RNA, 19 nt, Human
cccauguuacaggcaaagc

SEQ ID NO: 1383696 - RNA, 21 nt, Human
ccccauuucacaacccagaca

SEQ ID NO: 1383697 - RNA, 19 nt, Human
ccccgauucaaaccuggga

SEQ ID NO: 1383698 - RNA, 19 nt, Human
cccuaucuuuucuuuuaaa

SEQ ID NO: 1383699 - RNA, 21 nt, Human
cccugagccaccgggaaagcc

SEQ ID NO: 1383700 - RNA, 19 nt, Human
cccugggucuaucagaccu

SEQ ID NO: 1383701 - RNA, 19 nt, Human
ccgaagcuuucuucuuguu

SEQ ID NO: 1383702 - RNA, 22 nt, Human
ccucacucuguugcccaggcug

SEQ ID NO: 1383703 - RNA, 24 nt, Human
ccucacucuguugcccaggcugga

SEQ ID NO: 1383704 - RNA, 26 nt, Human
ccucacucuguugcccaggcuggagu

SEQ ID NO: 1383705 - RNA, 20 nt, Human
ccuccaucugccaggggcuc

SEQ ID NO: 1383706 - RNA, 24 nt, Human
ccucccaccucagccuucugagua

SEQ ID NO: 1383707 - RNA, 21 nt, Human
ccucgaacuccugggcucaag

SEQ ID NO: 1383708 - RNA, 22 nt, Human
ccucgaacuccugggcucaagu

SEQ ID NO: 1383709 - RNA, 19 nt, Human
ccugggcucaaguacuccu

SEQ ID NO: 1383710 - RNA, 24 nt, Human
ccuguggcucagagcagcaagagc

SEQ ID NO: 1383711 - RNA, 25 nt, Human
cgaacuccugggcucaaguacuccu

SEQ ID NO: 1383712 - RNA, 19 nt, Human
cucaaguacuccucccacc

SEQ ID NO: 1383713 - RNA, 24 nt, Human
cucaaguacuccucccaccucagc

SEQ ID NO: 1383714 - RNA, 24 nt, Human
cucacucuguugcccaggcuggag

SEQ ID NO: 1383715 - RNA, 18 nt, Human
cuccugggcucaaguacu

SEQ ID NO: 1383716 - RNA, 23 nt, Human
cuccugggcucaaguacuccucc

SEQ ID NO: 1383717 - RNA, 22 nt, Human
cugagaacccugagccaccggg

SEQ ID NO: 1383718 - RNA, 24 nt, Human
cuggcacugcccaaagcccuucuc

SEQ ID NO: 1383719 - RNA, 21 nt, Human
cugugaccacaggugcaaacc

SEQ ID NO: 1383720 - RNA, 21 nt, Human
cuuagcccaucccaacccagc

SEQ ID NO: 1383721 - RNA, 24 nt, Human
cuucugaguagcugugaccacagg

SEQ ID NO: 1383722 - RNA, 21 nt, Human
gaaggggaggggagggaacag

SEQ ID NO: 1383723 - RNA, 24 nt, Human
gaaugaacuuaaccuccacuaaua

SEQ ID NO: 1383724 - RNA, 19 nt, Human
gacaggaaggggaggggag

SEQ ID NO: 1383725 - RNA, 20 nt, Human
gacaggaaggggaggggagg

SEQ ID NO: 1383726 - RNA, 22 nt, Human
gacagugaugaaggacacagcc

SEQ ID NO: 1383727 - RNA, 21 nt, Human
gaccacaggugcaaaccacca

SEQ ID NO: 1383728 - RNA, 19 nt, Human
gagacuggcacugcccaaa

SEQ ID NO: 1383729 - RNA, 19 nt, Human
gcagggccagugggcugug

SEQ ID NO: 1383730 - RNA, 25 nt, Human
gcccaaagcccuucuccuagcaauc

SEQ ID NO: 1383731 - RNA, 20 nt, Human
gcccaggcuggagugcagug

SEQ ID NO: 1383732 - RNA, 19 nt, Human
gcuggagugcaguggcaca

SEQ ID NO: 1383733 - RNA, 22 nt, Human
ggaaaacccaccauguuacuga

SEQ ID NO: 1383734 - RNA, 21 nt, Human
ggaagcugaggcugagaacau

SEQ ID NO: 1383735 - RNA, 22 nt, Human
ggaauaaagaaaucuguaaaaa

SEQ ID NO: 1383736 - RNA, 21 nt, Human
ggacaggaaggggaggggagg

SEQ ID NO: 1383737 - RNA, 18 nt, Human
ggccagugggcugugugc

SEQ ID NO: 1383738 - RNA, 19 nt, Human
ggccuagugaagccgggcu

SEQ ID NO: 1383739 - RNA, 21 nt, Human
gggacagggauagggacagga

SEQ ID NO: 1383740 - RNA, 18 nt, Human
gggaggggagggaacagg

SEQ ID NO: 1383741 - RNA, 18 nt, Human
gugaccaucuuguugucc

SEQ ID NO: 1383742 - RNA, 20 nt, Human
uaaaacaagcccacaaggaa

SEQ ID NO: 1383743 - RNA, 19 nt, Human
uaaauaguucaacucaaau

SEQ ID NO: 1383744 - RNA, 24 nt, Human
uaaaucccugaccuaauaaagucc

SEQ ID NO: 1383745 - RNA, 23 nt, Human
uaacuuagcccaucccaacccag

SEQ ID NO: 1383746 - RNA, 21 nt, Human
uaagacgccauugcacccaca

SEQ ID NO: 1383747 - RNA, 23 nt, Human
uaggaugccgcagggccaguggg

SEQ ID NO: 1383748 - RNA, 20 nt, Human
uauacaagaaaaaugaacua

SEQ ID NO: 1383749 - RNA, 19 nt, Human
uauugugaaaggacaggaa

SEQ ID NO: 1383750 - RNA, 24 nt, Human
ucacucuguugcccaggcuggagu

SEQ ID NO: 1383751 - RNA, 21 nt, Human
ucacugacaccuccuggcugc

SEQ ID NO: 1383752 - RNA, 23 nt, Human
ucacuguaaccucgaacuccugg

SEQ ID NO: 1383753 - RNA, 24 nt, Human
ucacuguaaccucgaacuccuggg

SEQ ID NO: 1383754 - RNA, 22 nt, Human
ucagagcagcaagagccuccag

SEQ ID NO: 1383755 - RNA, 21 nt, Human
uccaguguguccuuccccagc

SEQ ID NO: 1383756 - RNA, 21 nt, Human
ucccacaggguggagccucca

SEQ ID NO: 1383757 - RNA, 18 nt, Human
uccccagccauaacaacu

SEQ ID NO: 1383758 - RNA, 22 nt, Human
uccuggcugcgggucacuggag

SEQ ID NO: 1383759 - RNA, 18 nt, Human
uccugggcucaaguacuc

SEQ ID NO: 1383760 - RNA, 24 nt, Human
uccugggcucaaguacuccuccca

SEQ ID NO: 1383761 - RNA, 22 nt, Human
ucuacugcucacugacuauuua

SEQ ID NO: 1383762 - RNA, 21 nt, Human
ucucugccacacagccaggaa

SEQ ID NO: 1383763 - RNA, 25 nt, Human
ucucugccacacagccaggaagcag

SEQ ID NO: 1383764 - RNA, 22 nt, Human
ucugaguagcugugaccacagg

SEQ ID NO: 1383765 - RNA, 24 nt, Human
ucugaguagcugugaccacaggug

SEQ ID NO: 1383766 - RNA, 18 nt, Human
ucuguugcccaggcugga

SEQ ID NO: 1383767 - RNA, 24 nt, Human
ucuguugcccaggcuggagugcag

SEQ ID NO: 1383768 - RNA, 20 nt, Human
ugaaaggacaggaaggggaa

SEQ ID NO: 1383769 - RNA, 23 nt, Human
ugaccaaagucauacagcagaaa

SEQ ID NO: 1383770 - RNA, 24 nt, Human
ugaccaaagucauacagcagaaaa

SEQ ID NO: 1383771 - RNA, 18 nt, Human
ugaggaaauguuucagag

SEQ ID NO: 1383772 - RNA, 28 nt, Human
ugcaaacaggagacuggcacugcccaaa

SEQ ID NO: 1383773 - RNA, 18 nt, Human
ugcccaggcuggagugca

SEQ ID NO: 1383774 - RNA, 21 nt, Human
ugcccaggcuggagugcagug

SEQ ID NO: 1383775 - RNA, 22 nt, Human
ugcccaggcuggagugcagugg

SEQ ID NO: 1383776 - RNA, 24 nt, Human
ugcccaggcuggagugcaguggca

SEQ ID NO: 1383777 - RNA, 18 nt, Human
ugcuagaaacauaugagg

SEQ ID NO: 1383778 - RNA, 19 nt, Human
ugcugggggacagggauag

SEQ ID NO: 1383779 - RNA, 20 nt, Human
ugcuuauucucaagaaauca

SEQ ID NO: 1383780 - RNA, 18 nt, Human
uggaaggagacaccccau

SEQ ID NO: 1383781 - RNA, 18 nt, Human
uggagugcaguggcacaa

SEQ ID NO: 1383782 - RNA, 19 nt, Human
uggagugcaguggcacaau

SEQ ID NO: 1383783 - RNA, 21 nt, Human
uggagugcaguggcacaauca

SEQ ID NO: 1383784 - RNA, 20 nt, Human
uggauccuuaaaacaagccc

SEQ ID NO: 1383785 - RNA, 20 nt, Human
uggcacaaucauaguucacu

SEQ ID NO: 1383786 - RNA, 24 nt, Human
uggcacaaucauaguucacuguaa

SEQ ID NO: 1383787 - RNA, 19 nt, Human
uggcauccaaggcgcagaa

SEQ ID NO: 1383788 - RNA, 19 nt, Human
ugguauagguaaggaagcu

SEQ ID NO: 1383789 - RNA, 21 nt, Human
ugucccagccugugcccaugu

SEQ ID NO: 1383790 - RNA, 18 nt, Human
ugugaaaggacaggaagg

SEQ ID NO: 1383791 - RNA, 24 nt, Human
ugugaccacaggugcaaaccacca

SEQ ID NO: 1383792 - RNA, 23 nt, Human
ugugcccauguuacaggcaaagc

SEQ ID NO: 1383793 - RNA, 19 nt, Human
uguuggagggggaaggggg

SEQ ID NO: 1383794 - RNA, 19 nt, Human
uuaaaucccugaccuaaua

SEQ ID NO: 1383795 - RNA, 21 nt, Human
uuccccagccauaacaacugg

SEQ ID NO: 1383796 - RNA, 24 nt, Human
uucugaguagcugugaccacaggu

SEQ ID NO: 1383797 - RNA, 18 nt, Human
uucugguucuccuccuuc

SEQ ID NO: 1383798 - RNA, 19 nt, Human
uucugguucuccuccuucu

SEQ ID NO: 1383799 - RNA, 22 nt, Human
uuuaccagacaaugagacugau

SEQ ID NO: 1383800 - RNA, 21 nt, Human
aagucaccgugguggagcugg

SEQ ID NO: 1383801 - RNA, 25 nt, Human
aauaagauuauugugaagauuaaga

SEQ ID NO: 1383802 - RNA, 18 nt, Human
acacaccaaaacuugaca

SEQ ID NO: 1383803 - RNA, 24 nt, Human
acaccaaaacuugacacagaaaac

SEQ ID NO: 1383804 - RNA, 19 nt, Human
acgggggcagcaugcccca

SEQ ID NO: 1383805 - RNA, 21 nt, Human
aggcaggauugggcaagugcu

SEQ ID NO: 1383806 - RNA, 21 nt, Human
auccaggugucucuacccagu

SEQ ID NO: 1383807 - RNA, 21 nt, Human
caaaucuuugugcaucagugu

SEQ ID NO: 1383808 - RNA, 24 nt, Human
caagugcucugaaaccaaaacauc

SEQ ID NO: 1383809 - RNA, 24 nt, Human
cagaaaacacuacauauuugcuau

SEQ ID NO: 1383810 - RNA, 26 nt, Human
cagcagccaugagaguucuucucuga

SEQ ID NO: 1383811 - RNA, 18 nt, Human
caggugucucuacccagu

SEQ ID NO: 1383812 - RNA, 24 nt, Human
ccaaaacaucuagauuugaauccu

SEQ ID NO: 1383813 - RNA, 20 nt, Human
ccagcagccaugagaguucu

SEQ ID NO: 1383814 - RNA, 24 nt, Human
ccagcagccaugagaguucuucuc

SEQ ID NO: 1383815 - RNA, 22 nt, Human
cccccaugcaaugggggaugga

SEQ ID NO: 1383816 - RNA, 18 nt, Human
ccgcccucaugcagggaa

SEQ ID NO: 1383817 - RNA, 18 nt, Human
ccuccagcagccaugaga

SEQ ID NO: 1383818 - RNA, 19 nt, Human
ccuccagcagccaugagag

SEQ ID NO: 1383819 - RNA, 22 nt, Human
ccuccagcagccaugagaguuc

SEQ ID NO: 1383820 - RNA, 19 nt, Human
ccuguggccaugggguggg

SEQ ID NO: 1383821 - RNA, 23 nt, Human
cugaaaccaaaacaucuagauuu

SEQ ID NO: 1383822 - RNA, 23 nt, Human
cugagguaaagacgguucucucc

SEQ ID NO: 1383823 - RNA, 18 nt, Human
cuggaggcccuaggagcu

SEQ ID NO: 1383824 - RNA, 23 nt, Human
gauaauaauaguaucuaauaaga

SEQ ID NO: 1383825 - RNA, 23 nt, Human
gcaaugggggauggagcaggggg

SEQ ID NO: 1383826 - RNA, 21 nt, Human
gcaggauugggcaagugcucu

SEQ ID NO: 1383827 - RNA, 18 nt, Human
gccagaugcccuguggcc

SEQ ID NO: 1383828 - RNA, 22 nt, Human
gggcaagugcucugaaaccaaa

SEQ ID NO: 1383829 - RNA, 18 nt, Human
ggggauggagcaggggga

SEQ ID NO: 1383830 - RNA, 23 nt, Human
gggggauggagcagggggaacuc

SEQ ID NO: 1383831 - RNA, 21 nt, Human
gucccccuucaccaagucacc

SEQ ID NO: 1383832 - RNA, 21 nt, Human
uaaaaggggauaauaauagua

SEQ ID NO: 1383833 - RNA, 27 nt, Human
uaaaugauucuuuaugcccuuccccca

SEQ ID NO: 1383834 - RNA, 23 nt, Human
uacuuuagaaaggcaggauuggg

SEQ ID NO: 1383835 - RNA, 22 nt, Human
uauugccagaugcccuguggcc

SEQ ID NO: 1383836 - RNA, 18 nt, Human
uccuaaaucuugacucca

SEQ ID NO: 1383837 - RNA, 21 nt, Human
ugaggccagacaaugucucca

SEQ ID NO: 1383838 - RNA, 21 nt, Human
ugaggccagacaaugucuccc

SEQ ID NO: 1383839 - RNA, 24 nt, Human
ugcaaugggggauggagcaggggg

SEQ ID NO: 1383840 - RNA, 22 nt, Human
ugccccaaacaccuuguccagc

SEQ ID NO: 1383841 - RNA, 18 nt, Human
ugcccuguggccaugggg

SEQ ID NO: 1383842 - RNA, 21 nt, Human
uggaggcccuaggagcugagg

SEQ ID NO: 1383843 - RNA, 19 nt, Human
uggaugagugggaggagcu

SEQ ID NO: 1383844 - RNA, 18 nt, Human
ugggaggagcugccagcg

SEQ ID NO: 1383845 - RNA, 24 nt, Human
ugggcaagugcucugaaaccaaaa

SEQ ID NO: 1383846 - RNA, 23 nt, Human
ugggcagugaggccagacaaugu

SEQ ID NO: 1383847 - RNA, 19 nt, Human
ugggggauggagcaggggg

SEQ ID NO: 1383848 - RNA, 24 nt, Human
uuagaaaggcaggauugggcaagu

SEQ ID NO: 1383849 - RNA, 20 nt, Human
uucuggcauuggucccccuu

SEQ ID NO: 1383850 - RNA, 20 nt, Human
uugccagaugcccuguggcc

SEQ ID NO: 1383851 - RNA, 18 nt, Human
uuuuuuuuuuuuuuuuug

SEQ ID NO: 1383852 - RNA, 19 nt, Human
uuuuuuuuuuuuuuuuugc

SEQ ID NO: 1383853 - RNA, 23 nt, Human
aagucuuccugagcugagcuucu

SEQ ID NO: 1383854 - RNA, 19 nt, Human
acacauuuccaaugcugcc

SEQ ID NO: 1383855 - RNA, 18 nt, Human
accauggggugccacagc

SEQ ID NO: 1383856 - RNA, 22 nt, Human
acccuggcagccgggaguucug

SEQ ID NO: 1383857 - RNA, 26 nt, Human
acuacaauuggcauugaauggaccaa

SEQ ID NO: 1383858 - RNA, 18 nt, Human
agaacacugcagacacac

SEQ ID NO: 1383859 - RNA, 24 nt, Human
agacaaaauaaccucccugugauc

SEQ ID NO: 1383860 - RNA, 20 nt, Human
agagacuguucugcacauug

SEQ ID NO: 1383861 - RNA, 20 nt, Human
agagcaggaagggccccuuc

SEQ ID NO: 1383862 - RNA, 20 nt, Human
agaguucuucccagcugcac

SEQ ID NO: 1383863 - RNA, 22 nt, Human
agaguucuucccagcugcacuc

SEQ ID NO: 1383864 - RNA, 26 nt, Human
agcaacauccugguucuuccuccggc

SEQ ID NO: 1383865 - RNA, 24 nt, Human
agcaguccggggaggccuggccuc

SEQ ID NO: 1383866 - RNA, 18 nt, Human
aggcagcaccuugcaggg

SEQ ID NO: 1383867 - RNA, 20 nt, Human
agggaagccugacccucucu

SEQ ID NO: 1383868 - RNA, 20 nt, Human
agggagcuacuucccucagc

SEQ ID NO: 1383869 - RNA, 18 nt, Human
augccucagcucugauga

SEQ ID NO: 1383870 - RNA, 25 nt, Human
caaaauaaccucccugugaucagac

SEQ ID NO: 1383871 - RNA, 21 nt, Human
caaagcggacagccaucuguc

SEQ ID NO: 1383872 - RNA, 22 nt, Human
caaagcggacagccaucugucu

SEQ ID NO: 1383873 - RNA, 22 nt, Human
caacgaugggugcccaugcaug

SEQ ID NO: 1383874 - RNA, 23 nt, Human
cagaacacugcagacacaccaug

SEQ ID NO: 1383875 - RNA, 18 nt, Human
cagcaaaacagguuuccc

SEQ ID NO: 1383876 - RNA, 26 nt, Human
caggcagcaacauccugguucuuccu

SEQ ID NO: 1383877 - RNA, 21 nt, Human
ccagaacacugcagacacacc

SEQ ID NO: 1383878 - RNA, 23 nt, Human
ccagaacacugcagacacaccau

SEQ ID NO: 1383879 - RNA, 28 nt, Human
ccaggaaaagcaggcuagcaguccgggg

SEQ ID NO: 1383880 - RNA, 24 nt, Human
cccccacagucacugugacccccu

SEQ ID NO: 1383881 - RNA, 23 nt, Human
ccccucaugcauuugugaaacag

SEQ ID NO: 1383882 - RNA, 19 nt, Human
cccuggcagccgggaguuc

SEQ ID NO: 1383883 - RNA, 21 nt, Human
ccucaacacacacacauuucc

SEQ ID NO: 1383884 - RNA, 21 nt, Human
ccugguucuuccuccggcucc

SEQ ID NO: 1383885 - RNA, 21 nt, Human
cggggaggccuggccucuccc

SEQ ID NO: 1383886 - RNA, 21 nt, Human
cugcagcacgcagaggcuugc

SEQ ID NO: 1383887 - RNA, 21 nt, Human
cuggaagucuuccugagcuga

SEQ ID NO: 1383888 - RNA, 24 nt, Human
cugguucuuccuccggcuccaggg

SEQ ID NO: 1383889 - RNA, 21 nt, Human
cuuccugagcugagcuucugc

SEQ ID NO: 1383890 - RNA, 18 nt, Human
gacacaccauggggugcc

SEQ ID NO: 1383891 - RNA, 20 nt, Human
gagcaggaagggccccuucu

SEQ ID NO: 1383892 - RNA, 18 nt, Human
gagccaagguccagggaa

SEQ ID NO: 1383893 - RNA, 23 nt, Human
gaugggugcccaugcaugugccc

SEQ ID NO: 1383894 - RNA, 19 nt, Human
gcagagccucaaagcggac

SEQ ID NO: 1383895 - RNA, 25 nt, Human
gccuggccucucccaggcuccuucc

SEQ ID NO: 1383896 - RNA, 20 nt, Human
gcuagcaguccggggaggcc

SEQ ID NO: 1383897 - RNA, 24 nt, Human
ggagcaaggggcuggggguagggg

SEQ ID NO: 1383898 - RNA, 19 nt, Human
gugaaacagaagccccaga

SEQ ID NO: 1383899 - RNA, 18 nt, Human
guucaaggccaugccuca

SEQ ID NO: 1383900 - RNA, 20 nt, Human
uagaugccaggggugccccc

SEQ ID NO: 1383901 - RNA, 20 nt, Human
uagcaguccggggaggccug

SEQ ID NO: 1383902 - RNA, 23 nt, Human
uaucauagagccccucuguuggg

SEQ ID NO: 1383903 - RNA, 21 nt, Human
uauccuggagagagcugaaau

SEQ ID NO: 1383904 - RNA, 21 nt, Human
ucaacacacacacauuuccaa

SEQ ID NO: 1383905 - RNA, 21 nt, Human
ucagcuagugccuccccucca

SEQ ID NO: 1383906 - RNA, 21 nt, Human
uccucagguuccuggaagucu

SEQ ID NO: 1383907 - RNA, 22 nt, Human
ucucccaggcuccuuccacugg

SEQ ID NO: 1383908 - RNA, 21 nt, Human
ucugacagggagaaggcauug

SEQ ID NO: 1383909 - RNA, 25 nt, Human
ucugcaggcagcaacauccugguuc

SEQ ID NO: 1383910 - RNA, 21 nt, Human
ucuguccuggcccugcagcac

SEQ ID NO: 1383911 - RNA, 21 nt, Human
ugaaacagaagccccagagac

SEQ ID NO: 1383912 - RNA, 24 nt, Human
ugaaugaagggagcuacuucccuc

SEQ ID NO: 1383913 - RNA, 18 nt, Human
ugccaggggugcccccac

SEQ ID NO: 1383914 - RNA, 19 nt, Human
ugcccagaacacugcagac

SEQ ID NO: 1383915 - RNA, 18 nt, Human
ugccccugguuuaaagcc

SEQ ID NO: 1383916 - RNA, 18 nt, Human
ugccuggagggacaaccu

SEQ ID NO: 1383917 - RNA, 24 nt, Human
uggcuguuaguggcagcuccuccu

SEQ ID NO: 1383918 - RNA, 23 nt, Human
ugguucuuccuccggcuccaggg

SEQ ID NO: 1383919 - RNA, 25 nt, Human
ugucagagacuguucugcacauugu

SEQ ID NO: 1383920 - RNA, 19 nt, Human
aaaaaggccuacugucuuu

SEQ ID NO: 1383921 - RNA, 19 nt, Human
aaaaggauucacccuucua

SEQ ID NO: 1383922 - RNA, 21 nt, Human
aaacaggaugcccuuguccuc

SEQ ID NO: 1383923 - RNA, 18 nt, Human
aaacccgcagcacacucc

SEQ ID NO: 1383924 - RNA, 24 nt, Human
aaacccgcagcacacuccagggug

SEQ ID NO: 1383925 - RNA, 22 nt, Human
aacucgucucucuucuacuuua

SEQ ID NO: 1383926 - RNA, 21 nt, Human
aacucugggcccggacaaccu

SEQ ID NO: 1383927 - RNA, 18 nt, Human
aagaggucaccgcauaug

SEQ ID NO: 1383928 - RNA, 23 nt, Human
aaguggaacagaagccagaaggc

SEQ ID NO: 1383929 - RNA, 21 nt, Human
acaacacaggaaacaggaugc

SEQ ID NO: 1383930 - RNA, 18 nt, Human
accauagaauucucagca

SEQ ID NO: 1383931 - RNA, 23 nt, Human
acuagaaucagaaguggagccug

SEQ ID NO: 1383932 - RNA, 18 nt, Human
acucgucucucuucuacu

SEQ ID NO: 1383933 - RNA, 21 nt, Human
agaacuagaaucagaagugga

SEQ ID NO: 1383934 - RNA, 24 nt, Human
agagaacuagaaucagaaguggag

SEQ ID NO: 1383935 - RNA, 18 nt, Human
agcaagaacgccuccauu

SEQ ID NO: 1383936 - RNA, 21 nt, Human
aggagauuaaaguaucaacau

SEQ ID NO: 1383937 - RNA, 22 nt, Human
aggggccuaggagggccccaga

SEQ ID NO: 1383938 - RNA, 20 nt, Human
aggggucuaagacaucaggg

SEQ ID NO: 1383939 - RNA, 20 nt, Human
agguaggggccuaggagggc

SEQ ID NO: 1383940 - RNA, 21 nt, Human
auggauuugggaaaaguaaag

SEQ ID NO: 1383941 - RNA, 23 nt, Human
caacacaggaaacaggaugcccc

SEQ ID NO: 1383942 - RNA, 19 nt, Human
caagagaacuagaaucaga

SEQ ID NO: 1383943 - RNA, 19 nt, Human
caagagaacuagaaucaga

SEQ ID NO: 1383944 - RNA, 18 nt, Human
caccaggcgcacgcucuc

SEQ ID NO: 1383945 - RNA, 21 nt, Human
cagaaguggagccugacaaug

SEQ ID NO: 1383946 - RNA, 22 nt, Human
cagcacacuccagggugcuuga

SEQ ID NO: 1383947 - RNA, 23 nt, Human
cagcguaguccacuaucucuguu

SEQ ID NO: 1383948 - RNA, 25 nt, Human
caucuucuuccuaaacuggugggga

SEQ ID NO: 1383949 - RNA, 21 nt, Human
ccccagaaaugaagccgaagc

SEQ ID NO: 1383950 - RNA, 24 nt, Human
cuauaguccuucuuacgugucucu

SEQ ID NO: 1383951 - RNA, 20 nt, Human
cuccucuaacugaaaugccc

SEQ ID NO: 1383952 - RNA, 24 nt, Human
cuccucuaccccaucuucuuccua

SEQ ID NO: 1383953 - RNA, 23 nt, Human
cucucaccaggcgcacgcucucc

SEQ ID NO: 1383954 - RNA, 19 nt, Human
cucuguuccauuuucauug

SEQ ID NO: 1383955 - RNA, 18 nt, Human
cucuucuugcaaaaaggc

SEQ ID NO: 1383956 - RNA, 20 nt, Human
gaacagaagccagaaggccc

SEQ ID NO: 1383957 - RNA, 22 nt, Human
gaagccagaaggcccuacagug

SEQ ID NO: 1383958 - RNA, 20 nt, Human
gaccucucccccgcaugccc

SEQ ID NO: 1383959 - RNA, 19 nt, Human
gaggaccaggagccugucc

SEQ ID NO: 1383960 - RNA, 20 nt, Human
gaucuugcucuccuguguca

SEQ ID NO: 1383961 - RNA, 21 nt, Human
gaucuugcucuccugugucac

SEQ ID NO: 1383962 - RNA, 19 nt, Human
ggugcuugaugacaucaag

SEQ ID NO: 1383963 - RNA, 21 nt, Human
gugcuucuauuuacaacacag

SEQ ID NO: 1383964 - RNA, 18 nt, Human
guggaacagaagccagaa

SEQ ID NO: 1383965 - RNA, 18 nt, Human
uaaacugguggggagagc

SEQ ID NO: 1383966 - RNA, 18 nt, Human
uaacagugguaacagacu

SEQ ID NO: 1383967 - RNA, 19 nt, Human
uaagaaacccgcagcacac

SEQ ID NO: 1383968 - RNA, 19 nt, Human
uacaacacaggaaacagga

SEQ ID NO: 1383969 - RNA, 20 nt, Human
uacauuuuauaagacuauag

SEQ ID NO: 1383970 - RNA, 20 nt, Human
uaccccaucuucuuccuaag

SEQ ID NO: 1383971 - RNA, 20 nt, Human
uaggggccuaggagggcccc

SEQ ID NO: 1383972 - RNA, 22 nt, Human
ucaaauuucccagguucucuca

SEQ ID NO: 1383973 - RNA, 22 nt, Human
ucaaguggaacagaagccagaa

SEQ ID NO: 1383974 - RNA, 20 nt, Human
ucaccaggcgcacgcucucc

SEQ ID NO: 1383975 - RNA, 24 nt, Human
ucauacucaggcagguucuguacu

SEQ ID NO: 1383976 - RNA, 22 nt, Human
ucguucucucucaccaggcgca

SEQ ID NO: 1383977 - RNA, 19 nt, Human
ucuccgcccggggcaggag

SEQ ID NO: 1383978 - RNA, 19 nt, Human
ucuccucuaccccaucuuc

SEQ ID NO: 1383979 - RNA, 18 nt, Human
ugaccauagaauucucag

SEQ ID NO: 1383980 - RNA, 20 nt, Human
ugaggggucuaagacaucag

SEQ ID NO: 1383981 - RNA, 24 nt, Human
ugcaaaaaggccuacugucuuuaa

SEQ ID NO: 1383982 - RNA, 18 nt, Human
ugccccguccccuagcuc

SEQ ID NO: 1383983 - RNA, 21 nt, Human
ugccccguccccuagcucccu

SEQ ID NO: 1383984 - RNA, 25 nt, Human
ugccccguccccuagcucccuuuca

SEQ ID NO: 1383985 - RNA, 18 nt, Human
uggaacagaagccagaag

SEQ ID NO: 1383986 - RNA, 30 nt, Human
uggagccugacaaugugacuaaagugcugg

SEQ ID NO: 1383987 - RNA, 21 nt, Human
uggccuaacugucucggaggc

SEQ ID NO: 1383988 - RNA, 21 nt, Human
ugggaaaaguaaagugaaaac

SEQ ID NO: 1383989 - RNA, 18 nt, Human
ugggaggagauuaaagua

SEQ ID NO: 1383990 - RNA, 21 nt, Human
ugggucaaucaacucucucca

SEQ ID NO: 1383991 - RNA, 19 nt, Human
ugggucucuggauuggggc

SEQ ID NO: 1383992 - RNA, 28 nt, Human
ugguggggagagacacacugagaggagg

SEQ ID NO: 1383993 - RNA, 22 nt, Human
uuaauauucuucuggauguuag

SEQ ID NO: 1383994 - RNA, 19 nt, Human
uugcugggucucuggauug

SEQ ID NO: 1383995 - RNA, 23 nt, Human
uugcugggucucuggauuggggc

SEQ ID NO: 1383996 - RNA, 19 nt, Human
aaacagaugagaccuccca

SEQ ID NO: 1383997 - RNA, 22 nt, Human
caaacaggaugcucugguucuu

SEQ ID NO: 1383998 - RNA, 24 nt, Human
cacaagcaaguaacuggagaagca

SEQ ID NO: 1383999 - RNA, 26 nt, Human
cccaaacagaugagaccucccaacuu

SEQ ID NO: 1384000 - RNA, 22 nt, Human
gacaucuuuggccacuucuugc

SEQ ID NO: 1384001 - RNA, 22 nt, Human
gcgguucuagugacuauagccu

SEQ ID NO: 1384002 - RNA, 18 nt, Human
ggaaaacaaccuuucuca

SEQ ID NO: 1384003 - RNA, 22 nt, Human
guccgaacuguccuuaguaggg

SEQ ID NO: 1384004 - RNA, 23 nt, Human
uacccuguucauuugaaagcuua

SEQ ID NO: 1384005 - RNA, 18 nt, Human
uagaugcaacuuuacccu

SEQ ID NO: 1384006 - RNA, 19 nt, Human
uagcuaggcauccuaaagc

SEQ ID NO: 1384007 - RNA, 22 nt, Human
uagugacuauagccuuagguga

SEQ ID NO: 1384008 - RNA, 23 nt, Human
ucugaagugacaucuuuggccac

SEQ ID NO: 1384009 - RNA, 18 nt, Human
ucuuuggccacuucuugc

SEQ ID NO: 1384010 - RNA, 20 nt, Human
ugagaccucccaacuugaaa

SEQ ID NO: 1384011 - RNA, 21 nt, Human
uggagaagcaggccagagugc

SEQ ID NO: 1384012 - RNA, 23 nt, Human
ugguucuuguccauuuuccuagc

SEQ ID NO: 1384013 - RNA, 22 nt, Human
uguagcuaggcauccuaaagcc

SEQ ID NO: 1384014 - RNA, 19 nt, Human
uuccguguuugauguagcu

SEQ ID NO: 1384015 - RNA, 21 nt, Human
uucuugcuuugcuaaaaauug

SEQ ID NO: 1384016 - RNA, 23 nt, Human
uugaaaggaucccugcaccacaa

SEQ ID NO: 1384017 - RNA, 21 nt, Human
aaaccccagcccucagguacc

SEQ ID NO: 1384018 - RNA, 19 nt, Human
aaagggaucaggugcucug

SEQ ID NO: 1384019 - RNA, 19 nt, Human
aaaugacacuuccccuccc

SEQ ID NO: 1384020 - RNA, 19 nt, Human
aagacacgcacugacgaca

SEQ ID NO: 1384021 - RNA, 24 nt, Human
aaggagcggagccgagacccugcc

SEQ ID NO: 1384022 - RNA, 22 nt, Human
aaggaggcaucacacaaggaaa

SEQ ID NO: 1384023 - RNA, 19 nt, Human
acagcagaagggccaacgg

SEQ ID NO: 1384024 - RNA, 21 nt, Human
acagcagaagggccaacggga

SEQ ID NO: 1384025 - RNA, 21 nt, Human
accacagggugcaccagcccg

SEQ ID NO: 1384026 - RNA, 28 nt, Human
agacccagcgaggccaccggagccagga

SEQ ID NO: 1384027 - RNA, 23 nt, Human
agaccggcagccucgacgaagaa

SEQ ID NO: 1384028 - RNA, 20 nt, Human
agaguaaguggaaggguggg

SEQ ID NO: 1384029 - RNA, 20 nt, Human
agcaugggcccuggcaccug

SEQ ID NO: 1384030 - RNA, 20 nt, Human
aggaguuuugggcccagagc

SEQ ID NO: 1384031 - RNA, 20 nt, Human
aggcaggaguuuugggccca

SEQ ID NO: 1384032 - RNA, 21 nt, Human
aggcaggaguuuugggcccag

SEQ ID NO: 1384033 - RNA, 23 nt, Human
aggcaggaguuuugggcccagag

SEQ ID NO: 1384034 - RNA, 25 nt, Human
aggccaaggccaggggaccucgaga

SEQ ID NO: 1384035 - RNA, 24 nt, Human
agggugcaccagcccgcagggcag

SEQ ID NO: 1384036 - RNA, 21 nt, Human
agguguuagcggucuauaacu

SEQ ID NO: 1384037 - RNA, 21 nt, Human
augggcccuggcaccugucag

SEQ ID NO: 1384038 - RNA, 28 nt, Human
augggcccuggcaccugucccgucaacg

SEQ ID NO: 1384039 - RNA, 22 nt, Human
caaaauuagcagcaaugcugag

SEQ ID NO: 1384040 - RNA, 25 nt, Human
caaaguacuugagacauugccugug

SEQ ID NO: 1384041 - RNA, 23 nt, Human
caaccaggccaaggccaggggac

SEQ ID NO: 1384042 - RNA, 23 nt, Human
cacauccagggaaaccccagccc

SEQ ID NO: 1384043 - RNA, 23 nt, Human
caccugucagccccggcaggucu

SEQ ID NO: 1384044 - RNA, 22 nt, Human
cacguacucagccaugcauaua

SEQ ID NO: 1384045 - RNA, 21 nt, Human
cacuuccccucccauugucac

SEQ ID NO: 1384046 - RNA, 19 nt, Human
cagaaaaucauuucaccau

SEQ ID NO: 1384047 - RNA, 19 nt, Human
cagaaacuagcaggaccaa

SEQ ID NO: 1384048 - RNA, 22 nt, Human
cagcagaagggccaacgggagg

SEQ ID NO: 1384049 - RNA, 22 nt, Human
caggagcccacacuugucacac

SEQ ID NO: 1384050 - RNA, 20 nt, Human
caggccacagagcugugcac

SEQ ID NO: 1384051 - RNA, 21 nt, Human
cagggaaaccccagcccucaa

SEQ ID NO: 1384052 - RNA, 23 nt, Human
caggucucacggccuccggaacc

SEQ ID NO: 1384053 - RNA, 22 nt, Human
cauauagacagcaaacauuaug

SEQ ID NO: 1384054 - RNA, 25 nt, Human
ccacagagcugugcaccgcccggcc

SEQ ID NO: 1384055 - RNA, 21 nt, Human
ccacaggccacagagcugugc

SEQ ID NO: 1384056 - RNA, 20 nt, Human
ccagaaacuagcaggaccaa

SEQ ID NO: 1384057 - RNA, 22 nt, Human
cccacauccagggaaaccccag

SEQ ID NO: 1384058 - RNA, 21 nt, Human
cccgcacgaguucccagcccc

SEQ ID NO: 1384059 - RNA, 23 nt, Human
ccuaaggucaaaguacuugagac

SEQ ID NO: 1384060 - RNA, 21 nt, Human
ccuccuuuccuagguaugggc

SEQ ID NO: 1384061 - RNA, 22 nt, Human
ccuggcaccugucagccccggc

SEQ ID NO: 1384062 - RNA, 20 nt, Human
ccugucagccccggcagguc

SEQ ID NO: 1384063 - RNA, 19 nt, Human
cgaggacaccaggcaggag

SEQ ID NO: 1384064 - RNA, 19 nt, Human
cgcacgucgcggguacacg

SEQ ID NO: 1384065 - RNA, 24 nt, Human
cgccucggucgcgccccgcacgag

SEQ ID NO: 1384066 - RNA, 19 nt, Human
cggagccgagacccugccg

SEQ ID NO: 1384067 - RNA, 23 nt, Human
cggccuccggaaccauggacccu

SEQ ID NO: 1384068 - RNA, 22 nt, Human
cguccgcaagaaggcugagcac

SEQ ID NO: 1384069 - RNA, 22 nt, Human
cucacagcagaagggccaacgg

SEQ ID NO: 1384070 - RNA, 20 nt, Human
cucuaaaucccauuguccuc

SEQ ID NO: 1384071 - RNA, 23 nt, Human
cugugagaagagggagcgccugg

SEQ ID NO: 1384072 - RNA, 20 nt, Human
cuucuacccuaaggucaaag

SEQ ID NO: 1384073 - RNA, 23 nt, Human
cuugcagccaagcaugcuccauu

SEQ ID NO: 1384074 - RNA, 22 nt, Human
gaaaccccagcccucagguacc

SEQ ID NO: 1384075 - RNA, 20 nt, Human
gaagaguaaguggaagggug

SEQ ID NO: 1384076 - RNA, 19 nt, Human
gaccacagggugcaccagc

SEQ ID NO: 1384077 - RNA, 19 nt, Human
gagacauuuacuggcagcu

SEQ ID NO: 1384078 - RNA, 19 nt, Human
gaggcaucacacaaggaaa

SEQ ID NO: 1384079 - RNA, 19 nt, Human
gaggccaccggagccagga

SEQ ID NO: 1384080 - RNA, 18 nt, Human
gagguggggccgcugugu

SEQ ID NO: 1384081 - RNA, 24 nt, Human
gcacacaggcucccgcagcauggg

SEQ ID NO: 1384082 - RNA, 23 nt, Human
gccacaggccacagagcugugca

SEQ ID NO: 1384083 - RNA, 23 nt, Human
gccccgcacgaguucccagcccc

SEQ ID NO: 1384084 - RNA, 22 nt, Human
gccgacuccggcuuuucgccac

SEQ ID NO: 1384085 - RNA, 22 nt, Human
gccgagacccugccgacagcag

SEQ ID NO: 1384086 - RNA, 21 nt, Human
gccgcugugagaagagggagc

SEQ ID NO: 1384087 - RNA, 21 nt, Human
gcuaacuccgggaaaccagug

SEQ ID NO: 1384088 - RNA, 24 nt, Human
gcuuagaaggagcggagccgagac

SEQ ID NO: 1384089 - RNA, 19 nt, Human
ggaaugaacaguccucugc

SEQ ID NO: 1384090 - RNA, 22 nt, Human
ggacgaggacaccaggcaggag

SEQ ID NO: 1384091 - RNA, 18 nt, Human
ggacugagguggggccgc

SEQ ID NO: 1384092 - RNA, 21 nt, Human
ggagacgcuauucucuuuacc

SEQ ID NO: 1384093 - RNA, 30 nt, Human
ggagccgagacccugccgacagcaggggaa

SEQ ID NO: 1384094 - RNA, 21 nt, Human
ggaggaagaguaaguggaagg

SEQ ID NO: 1384095 - RNA, 20 nt, Human
ggcagcuuugccuucuaccc

SEQ ID NO: 1384096 - RNA, 24 nt, Human
gggcauugcaaaguuuccccaaug

SEQ ID NO: 1384097 - RNA, 21 nt, Human
gggccaacgggaggcagggaa

SEQ ID NO: 1384098 - RNA, 24 nt, Human
gugugccuaaggaggcaucacaca

SEQ ID NO: 1384099 - RNA, 22 nt, Human
guguguggagcaguacacgggc

SEQ ID NO: 1384100 - RNA, 19 nt, Human
uaaggaggcaucacacaag

SEQ ID NO: 1384101 - RNA, 22 nt, Human
uaaguggaagggugggacgagg

SEQ ID NO: 1384102 - RNA, 20 nt, Human
uacagcucccgucaucccuu

SEQ ID NO: 1384103 - RNA, 21 nt, Human
uagaaggagcggagccgagac

SEQ ID NO: 1384104 - RNA, 24 nt, Human
uagacagcaaacauuaugaaucuc

SEQ ID NO: 1384105 - RNA, 19 nt, Human
uaugcacaccacgcacgua

SEQ ID NO: 1384106 - RNA, 23 nt, Human
ucacaguuugguucugcuaauca

SEQ ID NO: 1384107 - RNA, 23 nt, Human
uccaggcgagcucacagcagaag

SEQ ID NO: 1384108 - RNA, 21 nt, Human
ucccagccccacauccaggga

SEQ ID NO: 1384109 - RNA, 23 nt, Human
ucccagccccacauccagggaaa

SEQ ID NO: 1384110 - RNA, 22 nt, Human
uccccgagacccagcgaggcca

SEQ ID NO: 1384111 - RNA, 21 nt, Human
uccgcaagaaggcugagcaca

SEQ ID NO: 1384112 - RNA, 22 nt, Human
ucuacaacacauuuauuuguac

SEQ ID NO: 1384113 - RNA, 19 nt, Human
ucuucggggcauugcaaag

SEQ ID NO: 1384114 - RNA, 21 nt, Human
ucuucggggcauugcaaaguu

SEQ ID NO: 1384115 - RNA, 23 nt, Human
ugacgacaucacgcacguacgca

SEQ ID NO: 1384116 - RNA, 21 nt, Human
uggcaccugucagccccggca

SEQ ID NO: 1384117 - RNA, 19 nt, Human
uggcuaguguccaggcugc

SEQ ID NO: 1384118 - RNA, 23 nt, Human
ugggcccuggcaccugucagccc

SEQ ID NO: 1384119 - RNA, 26 nt, Human
ugggcgcgcaaucacgcauguaugca

SEQ ID NO: 1384120 - RNA, 21 nt, Human
ugggguuugaaaucacaguca

SEQ ID NO: 1384121 - RNA, 24 nt, Human
ugggugucuagggccgacuccggc

SEQ ID NO: 1384122 - RNA, 21 nt, Human
ugguucugcuaaucacagcag

SEQ ID NO: 1384123 - RNA, 26 nt, Human
uguaugcacaccacgcacguacgcgg

SEQ ID NO: 1384124 - RNA, 20 nt, Human
ugucacggggcgaguguuug

SEQ ID NO: 1384125 - RNA, 19 nt, Human
ugugcaccgcccggccuca

SEQ ID NO: 1384126 - RNA, 24 nt, Human
uguguguggagcaguacacgggcu

SEQ ID NO: 1384127 - RNA, 24 nt, Human
uguuugggacucuaaaucccauug

SEQ ID NO: 1384128 - RNA, 21 nt, Human
uuagcggucuauaacucuucc

SEQ ID NO: 1384129 - RNA, 18 nt, Human
uuuacuggcagcuuugcc

SEQ ID NO: 1384130 - RNA, 23 nt, Human
uuuucuaguuccacaaccucauc

SEQ ID NO: 1384131 - RNA, 20 nt, Human
aaggaccucacagggguaug

SEQ ID NO: 1384132 - RNA, 21 nt, Human
aaggcaccugcaacccagaac

SEQ ID NO: 1384133 - RNA, 24 nt, Human
acccagaacgcagcagcucaggcc

SEQ ID NO: 1384134 - RNA, 24 nt, Human
accuaagucagagcacugcccagu

SEQ ID NO: 1384135 - RNA, 21 nt, Human
agagcacugcccagugaagcc

SEQ ID NO: 1384136 - RNA, 19 nt, Human
aggaacgcccccgcgcccc

SEQ ID NO: 1384137 - RNA, 21 nt, Human
aggaacgcccccgcgccccgc

SEQ ID NO: 1384138 - RNA, 20 nt, Human
caacccagaacgcagcagcu

SEQ ID NO: 1384139 - RNA, 23 nt, Human
caacccagaacgcagcagcucag

SEQ ID NO: 1384140 - RNA, 18 nt, Human
caaucuuccuccugcccc

SEQ ID NO: 1384141 - RNA, 22 nt, Human
caccacccagucagcacaaauc

SEQ ID NO: 1384142 - RNA, 22 nt, Human
cacugcccagugaagccaccac

SEQ ID NO: 1384143 - RNA, 19 nt, Human
cagcagcucaggccagcug

SEQ ID NO: 1384144 - RNA, 24 nt, Human
ccaaccuaagucagagcacugccc

SEQ ID NO: 1384145 - RNA, 19 nt, Human
ccccgcgccggcggagccu

SEQ ID NO: 1384146 - RNA, 23 nt, Human
cccgccccugcaaucuuccuccu

SEQ ID NO: 1384147 - RNA, 18 nt, Human
ccugcaacccagaacgca

SEQ ID NO: 1384148 - RNA, 24 nt, Human
ccugcaacccagaacgcagcagcu

SEQ ID NO: 1384149 - RNA, 22 nt, Human
ccugcaaucuuccuccugcccc

SEQ ID NO: 1384150 - RNA, 20 nt, Human
cgcagcagcucaggccagcu

SEQ ID NO: 1384151 - RNA, 19 nt, Human
cuaggaacgcccccgcgcc

SEQ ID NO: 1384152 - RNA, 19 nt, Human
gaauucccgggagaguucc

SEQ ID NO: 1384153 - RNA, 22 nt, Human
gcaacccagaacgcagcagcuc

SEQ ID NO: 1384154 - RNA, 22 nt, Human
gccccgggcagggccuuagggg

SEQ ID NO: 1384155 - RNA, 20 nt, Human
ggcagggccuuaggggccgg

SEQ ID NO: 1384156 - RNA, 18 nt, Human
gucagagcacugcccagu

SEQ ID NO: 1384157 - RNA, 26 nt, Human
ucaaaacacuacuguccaugugcuga

SEQ ID NO: 1384158 - RNA, 21 nt, Human
ucagcacaaaucaaaacacua

SEQ ID NO: 1384159 - RNA, 26 nt, Human
uccuccugccccgggcagggccuuag

SEQ ID NO: 1384160 - RNA, 20 nt, Human
ucuucccgccccugcaaucu

SEQ ID NO: 1384161 - RNA, 21 nt, Human
ugaaaggaccucacaggggua

SEQ ID NO: 1384162 - RNA, 24 nt, Human
ugccccgggcagggccuuaggggc

SEQ ID NO: 1384163 - RNA, 19 nt, Human
aaaacaaaauaagacaaaa

SEQ ID NO: 1384164 - RNA, 18 nt, Human
aaacaaaaaaagcaaaca

SEQ ID NO: 1384165 - RNA, 26 nt, Human
aaacaaaaaaagcaaacaugcccugg

SEQ ID NO: 1384166 - RNA, 21 nt, Human
aaacaaaacaaaauaagacaa

SEQ ID NO: 1384167 - RNA, 26 nt, Human
aaacaaacacauaaacaaaaaaagca

SEQ ID NO: 1384168 - RNA, 19 nt, Human
aaacaagcauaaaaaucac

SEQ ID NO: 1384169 - RNA, 24 nt, Human
aaacaagcauaaaaaucacaaaaa

SEQ ID NO: 1384170 - RNA, 23 nt, Human
aacaaauguggaguaggccacaa

SEQ ID NO: 1384171 - RNA, 23 nt, Human
aacacauaaacaaaaaaagcaaa

SEQ ID NO: 1384172 - RNA, 22 nt, Human
aacugagaacuauuuuaaauau

SEQ ID NO: 1384173 - RNA, 18 nt, Human
aagaacuuucaguucaau

SEQ ID NO: 1384174 - RNA, 24 nt, Human
aagucaguucuagaucaucaccau

SEQ ID NO: 1384175 - RNA, 18 nt, Human
aaguucuaggaauucuuc

SEQ ID NO: 1384176 - RNA, 21 nt, Human
aaucacaugagaaacauuuaa

SEQ ID NO: 1384177 - RNA, 27 nt, Human
aaucacgugaacccaggaggcggagcu

SEQ ID NO: 1384178 - RNA, 21 nt, Human
aauggaauacaggaggaacug

SEQ ID NO: 1384179 - RNA, 21 nt, Human
acaaaacaaaauaagacaaaa

SEQ ID NO: 1384180 - RNA, 25 nt, Human
acaaacacauaaacaaaaaaagcaa

SEQ ID NO: 1384181 - RNA, 24 nt, Human
acaguguaagagagaauacaacuu

SEQ ID NO: 1384182 - RNA, 24 nt, Human
acagugugagacucugucucaaaa

SEQ ID NO: 1384183 - RNA, 22 nt, Human
acauaaaucccaacauauucca

SEQ ID NO: 1384184 - RNA, 18 nt, Human
accauguuggccaggcug

SEQ ID NO: 1384185 - RNA, 19 nt, Human
acgccggagcccacgggga

SEQ ID NO: 1384186 - RNA, 18 nt, Human
acgguguuucaccauguu

SEQ ID NO: 1384187 - RNA, 24 nt, Human
acgguguuucaccauguuggccag

SEQ ID NO: 1384188 - RNA, 18 nt, Human
agagagcaacugaaacau

SEQ ID NO: 1384189 - RNA, 23 nt, Human
agcaaaaggggcaggaggaagaa

SEQ ID NO: 1384190 - RNA, 20 nt, Human
agcaggaaaaaaaugcauaa

SEQ ID NO: 1384191 - RNA, 22 nt, Human
agccaauccgcggucccggcgc

SEQ ID NO: 1384192 - RNA, 23 nt, Human
agccgggcgugauggugcacgcc

SEQ ID NO: 1384193 - RNA, 24 nt, Human
agccugggccacagugugagacuc

SEQ ID NO: 1384194 - RNA, 20 nt, Human
agcgauucuccugccucagc

SEQ ID NO: 1384195 - RNA, 25 nt, Human
agcuggacucaccaguuucaaccug

SEQ ID NO: 1384196 - RNA, 20 nt, Human
aggaaaaugugaaaucccau

SEQ ID NO: 1384197 - RNA, 19 nt, Human
aggaggaagaagguacaga

SEQ ID NO: 1384198 - RNA, 19 nt, Human
aggaggaagaagguacaga

SEQ ID NO: 1384199 - RNA, 23 nt, Human
aggaugaaaguuggaauugcaaa

SEQ ID NO: 1384200 - RNA, 22 nt, Human
aggccgagaccccaggagcaaa

SEQ ID NO: 1384201 - RNA, 22 nt, Human
aggcuggucucuacugaaaaua

SEQ ID NO: 1384202 - RNA, 20 nt, Human
aguacaguggugcaaucuug

SEQ ID NO: 1384203 - RNA, 24 nt, Human
aguacaguggugcaaucuuggcuc

SEQ ID NO: 1384204 - RNA, 18 nt, Human
aguggcugggaauacagg

SEQ ID NO: 1384205 - RNA, 25 nt, Human
auaaauccuuccccaguuucuuuaa

SEQ ID NO: 1384206 - RNA, 26 nt, Human
auaaauccuuccccaguuucuuuaaa

SEQ ID NO: 1384207 - RNA, 22 nt, Human
aucauagcauuuuccagcaauu

SEQ ID NO: 1384208 - RNA, 21 nt, Human
auguaagaacuuucaguucaa

SEQ ID NO: 1384209 - RNA, 25 nt, Human
caaaaaaagcaaacaugcccuggug

SEQ ID NO: 1384210 - RNA, 20 nt, Human
caaaaaacaaacacauaaac

SEQ ID NO: 1384211 - RNA, 24 nt, Human
caaaaaacaaacacauaaacaaaa

SEQ ID NO: 1384212 - RNA, 25 nt, Human
caaaacucacuaggaaccaaucucc

SEQ ID NO: 1384213 - RNA, 19 nt, Human
caaaauaagacaaaacuug

SEQ ID NO: 1384214 - RNA, 22 nt, Human
caaccuccacaucccagguucc

SEQ ID NO: 1384215 - RNA, 21 nt, Human
caaccuucucacccgcgggcc

SEQ ID NO: 1384216 - RNA, 24 nt, Human
cacagugugagacucugucucaaa

SEQ ID NO: 1384217 - RNA, 22 nt, Human
cacauaaacaaaaaaagcaaac

SEQ ID NO: 1384218 - RNA, 19 nt, Human
caccaccacaccuaauuuu

SEQ ID NO: 1384219 - RNA, 21 nt, Human
caccauguuggccaggcuggu

SEQ ID NO: 1384220 - RNA, 24 nt, Human
caccauguuggccaggcuggucuc

SEQ ID NO: 1384221 - RNA, 30 nt, Human; identical to SEQ ID NO: 575876

SEQ ID NO: 1384222 - RNA, 23 nt, Human
cacgccugugaucccagcuacuu

SEQ ID NO: 1384223 - RNA, 24 nt, Human
cacgccugugaucccagcuacuug

SEQ ID NO: 1384224 - RNA, 25 nt, Human
cacugugcuggaguccagccugggc

SEQ ID NO: 1384225 - RNA, 18 nt, Human
cagaggcaaacauaaauc

SEQ ID NO: 1384226 - RNA, 19 nt, Human
cagcaggaaaaaaaugcau

SEQ ID NO: 1384227 - RNA, 22 nt, Human
cagccggccaaggccgagaccc

SEQ ID NO: 1384228 - RNA, 30 nt, Human; identical to SEQ ID NO: 575885

SEQ ID NO: 1384229 - RNA, 20 nt, Human
cagccuccugaguggcuggg

SEQ ID NO: 1384230 - RNA, 20 nt, Human
cauauuaaauugaagauaau

SEQ ID NO: 1384231 - RNA, 24 nt, Human
caucccagguuccagcgauucucc

SEQ ID NO: 1384232 - RNA, 28 nt, Human
cauguuggccaggcuggucucuacugaa

SEQ ID NO: 1384233 - RNA, 18 nt, Human
cauugcucaagacuucca

SEQ ID NO: 1384234 - RNA, 22 nt, Human
ccaaggccgagaccccaggagc

SEQ ID NO: 1384235 - RNA, 21 nt, Human
ccacccaccucccgucgcaac

SEQ ID NO: 1384236 - RNA, 27 nt, Human
ccagcgauucuccugccucagccuccu

SEQ ID NO: 1384237 - RNA, 26 nt, Human
cccaacauauuccaccgaccaaacaa

SEQ ID NO: 1384238 - RNA, 22 nt, Human
ccccaggagcaaagcccgcgcc

SEQ ID NO: 1384239 - RNA, 22 nt, Human
cccgacagcugcgcaagccgcc

SEQ ID NO: 1384240 - RNA, 22 nt, Human
cccucuguugcccaggcuggag

SEQ ID NO: 1384241 - RNA, 21 nt, Human
ccggccaaggccgagacccca

SEQ ID NO: 1384242 - RNA, 22 nt, Human
ccucccgucgcaaccuucucac

SEQ ID NO: 1384243 - RNA, 23 nt, Human
ccucccgucgcaaccuucucacc

SEQ ID NO: 1384244 - RNA, 18 nt, Human
ccugugaucccagcuacu

SEQ ID NO: 1384245 - RNA, 21 nt, Human
ccugugaucccagcuacuugg

SEQ ID NO: 1384246 - RNA, 22 nt, Human
ccugugaucccagcuacuuggg

SEQ ID NO: 1384247 - RNA, 19 nt, Human
cgaccaaacaagcauaaaa

SEQ ID NO: 1384248 - RNA, 22 nt, Human
cgaggcagccaauccgcggucc

SEQ ID NO: 1384249 - RNA, 24 nt, Human
cgcccgacgcggcugaacgcaguc

SEQ ID NO: 1384250 - RNA, 24 nt, Human
cgccugugaucccagcuacuuggg

SEQ ID NO: 1384251 - RNA, 23 nt, Human
cggccaaggccgagaccccagga

SEQ ID NO: 1384252 - RNA, 28 nt, Human
cuaauuuuuuguauuuuuaguagagacg

SEQ ID NO: 1384253 - RNA, 24 nt, Human
cuagaaaacacauuccacauauua

SEQ ID NO: 1384254 - RNA, 22 nt, Human
cuagauggagucucccucuguu

SEQ ID NO: 1384255 - RNA, 21 nt, Human
cuagggcacccgaacuugggc

SEQ ID NO: 1384256 - RNA, 18 nt, Human
cucaagacuuccauucag

SEQ ID NO: 1384257 - RNA, 21 nt, Human
cucacuaggaaccaaucucca

SEQ ID NO: 1384258 - RNA, 24 nt, Human
cucacugcaaccuccacaucccag

SEQ ID NO: 1384259 - RNA, 20 nt, Human
cucccgucgcaaccuucuca

SEQ ID NO: 1384260 - RNA, 24 nt, Human
cucccucuguugcccaggcuggag

SEQ ID NO: 1384261 - RNA, 23 nt, Human
cucuguugcccaggcuggaguac

SEQ ID NO: 1384262 - RNA, 20 nt, Human
cugcaaccuccacaucccaa

SEQ ID NO: 1384263 - RNA, 23 nt, Human
cugccucagccuccugaguggcu

SEQ ID NO: 1384264 - RNA, 20 nt, Human
cugguuuaaacaaacaaaac

SEQ ID NO: 1384265 - RNA, 24 nt, Human
gaacaaacauagcagaauugccuu

SEQ ID NO: 1384266 - RNA, 22 nt, Human
gaacaaauguggaguaggccac

SEQ ID NO: 1384267 - RNA, 27 nt, Human
gaccaaacaagcauaaaaaucacaaaa

SEQ ID NO: 1384268 - RNA, 23 nt, Human
gagcugagaucaugccacugugc

SEQ ID NO: 1384269 - RNA, 22 nt, Human
gagggccggucgccggcugccg

SEQ ID NO: 1384270 - RNA, 18 nt, Human
gauauaagauaaaauucu

SEQ ID NO: 1384271 - RNA, 24 nt, Human
gauggugcacgccugugaucccag

SEQ ID NO: 1384272 - RNA, 21 nt, Human
gauucuccugccucagccucc

SEQ ID NO: 1384273 - RNA, 21 nt, Human
gcaaaagcagagcgcaacccg

SEQ ID NO: 1384274 - RNA, 22 nt, Human
gcaaccuccacaucccagguuc

SEQ ID NO: 1384275 - RNA, 24 nt, Human
gccaccaauaaagaauucuaagca

SEQ ID NO: 1384276 - RNA, 20 nt, Human
gccucagccuccugaguggc

SEQ ID NO: 1384277 - RNA, 24 nt, Human
gccucagccuccugaguggcuggg

SEQ ID NO: 1384278 - RNA, 24 nt, Human
gcgauucuccugccucagccuccu

SEQ ID NO: 1384279 - RNA, 26 nt, Human
gcuaaaccagguugccauacauaauu

SEQ ID NO: 1384280 - RNA, 23 nt, Human
gcuagggcacccgaacuugggca

SEQ ID NO: 1384281 - RNA, 30 nt, Human; identical to SEQ ID NO: 575937

SEQ ID NO: 1384282 - RNA, 22 nt, Human
ggagcaaagcccgcgccucccg

SEQ ID NO: 1384283 - RNA, 23 nt, Human
ggagucucccucuguugcccagg

SEQ ID NO: 1384284 - RNA, 24 nt, Human
gggcgugauggugcacgccuguga

SEQ ID NO: 1384285 - RNA, 19 nt, Human
ggggcaggaggaagaaggu

SEQ ID NO: 1384286 - RNA, 23 nt, Human
gguaauaauagaaaaaucauagc

SEQ ID NO: 1384287 - RNA, 18 nt, Human
gguccagccggccaaggc

SEQ ID NO: 1384288 - RNA, 23 nt, Human
gguguuucaccauguuggccagg

SEQ ID NO: 1384289 - RNA, 23 nt, Human
guaaaauacucuguacccuguca

SEQ ID NO: 1384290 - RNA, 21 nt, Human
guauacccaaaguuuaaccca

SEQ ID NO: 1384291 - RNA, 20 nt, Human
gugaagaacaaacauagcag

SEQ ID NO: 1384292 - RNA, 20 nt, Human
gugugagacucugucucaaa

SEQ ID NO: 1384293 - RNA, 18 nt, Human
uaaaaaagcaaaaggggc

SEQ ID NO: 1384294 - RNA, 26 nt, Human
uaaaauacucuguacccugucaaaac

SEQ ID NO: 1384295 - RNA, 23 nt, Human
uaaaauagauacaacauuugggc

SEQ ID NO: 1384296 - RNA, 24 nt, Human
uaaaauagauacaacauuugggca

SEQ ID NO: 1384297 - RNA, 21 nt, Human
uaacccaauuguugcaacccc

SEQ ID NO: 1384298 - RNA, 24 nt, Human
uaacccugaggaaggaagaacaaa

SEQ ID NO: 1384299 - RNA, 24 nt, Human
uaauaauagaaaaaucauagcauu

SEQ ID NO: 1384300 - RNA, 25 nt, Human
uaauuuuuuguauuuuuaguagagg

SEQ ID NO: 1384301 - RNA, 22 nt, Human
uacagaaaucacaugagaaaca

SEQ ID NO: 1384302 - RNA, 19 nt, Human
uacaguggugcaaucuugg

SEQ ID NO: 1384303 - RNA, 22 nt, Human
uacaguggugcaaucuuggcuc

SEQ ID NO: 1384304 - RNA, 21 nt, Human
uacccugucaaaacuccuuug

SEQ ID NO: 1384305 - RNA, 18 nt, Human
uagaaaacacauuccaca

SEQ ID NO: 1384306 - RNA, 22 nt, Human
uagagacgguguuucaccaugu

SEQ ID NO: 1384307 - RNA, 24 nt, Human
uaguagagacgguguuucaccaug

SEQ ID NO: 1384308 - RNA, 20 nt, Human
ucaaccuguggaaaugaaau

SEQ ID NO: 1384309 - RNA, 22 nt, Human
ucacuagaaagacgcuagcuau

SEQ ID NO: 1384310 - RNA, 21 nt, Human
ucacugcaaccuccacauccc

SEQ ID NO: 1384311 - RNA, 24 nt, Human
ucacugcaaccuccacaucccagg

SEQ ID NO: 1384312 - RNA, 20 nt, Human
ucagccuccugaguggcugg

SEQ ID NO: 1384313 - RNA, 21 nt, Human
uccacauauuaaauugaagau

SEQ ID NO: 1384314 - RNA, 23 nt, Human
uccacaucccagguuccagcgau

SEQ ID NO: 1384315 - RNA, 21 nt, Human
ucccagguuccagcgauucuc

SEQ ID NO: 1384316 - RNA, 24 nt, Human
ucccagguuccagcgauucuccug

SEQ ID NO: 1384317 - RNA, 22 nt, Human
uccccaguuucuuuaaaaaagc

SEQ ID NO: 1384318 - RNA, 22 nt, Human
ucccggcgcuggcgaguuccac

SEQ ID NO: 1384319 - RNA, 20 nt, Human
ucccucuguugcccaggcug

SEQ ID NO: 1384320 - RNA, 24 nt, Human
ucccucuguugcccaggcuggagu

SEQ ID NO: 1384321 - RNA, 23 nt, Human
ucucccucuguugcccaggcugg

SEQ ID NO: 1384322 - RNA, 24 nt, Human
ucucccucuguugcccaggcugga

SEQ ID NO: 1384323 - RNA, 24 nt, Human
ucuccugccucagccuccugagug

SEQ ID NO: 1384324 - RNA, 23 nt, Human
ucucuacugaaaauacaaaaauu

SEQ ID NO: 1384325 - RNA, 18 nt, Human
ucuguugcccaggcugga

SEQ ID NO: 1384326 - RNA, 20 nt, Human
ugaagaacaaacauagcaga

SEQ ID NO: 1384327 - RNA, 23 nt, Human
ugaaguaagucaguucuagauca

SEQ ID NO: 1384328 - RNA, 24 nt, Human
ugagauggagucuagauggagucu

SEQ ID NO: 1384329 - RNA, 20 nt, Human
ugaggcaugagaaucacgug

SEQ ID NO: 1384330 - RNA, 24 nt, Human
ugaggcaugagaaucacgugaacc

SEQ ID NO: 1384331 - RNA, 24 nt, Human
ugauggugcacgccugugauccca

SEQ ID NO: 1384332 - RNA, 18 nt, Human
ugccauacauaauucaaa

SEQ ID NO: 1384333 - RNA, 21 nt, Human
ugccauuacaguuauuauucu

SEQ ID NO: 1384334 - RNA, 21 nt, Human
ugcccaggcuggaguacagug

SEQ ID NO: 1384335 - RNA, 24 nt, Human
ugcccaggcuggaguacaguggug

SEQ ID NO: 1384336 - RNA, 20 nt, Human
ugcccuggugcuuccaaugu

SEQ ID NO: 1384337 - RNA, 24 nt, Human
ugccucagccuccugaguggcugg

SEQ ID NO: 1384338 - RNA, 23 nt, Human
ugccuuaguugaggcuacagugu

SEQ ID NO: 1384339 - RNA, 20 nt, Human
ugcuggaguccagccugggc

SEQ ID NO: 1384340 - RNA, 22 nt, Human
ugcuuccaauguauacccaaag

SEQ ID NO: 1384341 - RNA, 24 nt, Human
uggaguacaguggugcaaucuugg

SEQ ID NO: 1384342 - RNA, 19 nt, Human
uggagucuagauggagucu

SEQ ID NO: 1384343 - RNA, 24 nt, Human
uggagucucccucuguugcccagg

SEQ ID NO: 1384344 - RNA, 20 nt, Human
uggccaggcuggucucuacu

SEQ ID NO: 1384345 - RNA, 22 nt, Human
uggcgaguuccacccaccuccc

SEQ ID NO: 1384346 - RNA, 24 nt, Human
ugggaauacaggcacgcaccacca

SEQ ID NO: 1384347 - RNA, 24 nt, Human
ugggaggcugaggcaugagaauca

SEQ ID NO: 1384348 - RNA, 21 nt, Human
uggugcacgccugugauccca

SEQ ID NO: 1384349 - RNA, 24 nt, Human
ugguuuaaacaaacaaaacaaaau

SEQ ID NO: 1384350 - RNA, 22 nt, Human
uguaagagagaauacaacuuag

SEQ ID NO: 1384351 - RNA, 19 nt, Human
ugucucaaaaaacaaacac

SEQ ID NO: 1384352 - RNA, 18 nt, Human
ugugaaaucccaucucaa

SEQ ID NO: 1384353 - RNA, 21 nt, Human
uuaaaaauacuuuuaguaaaa

SEQ ID NO: 1384354 - RNA, 22 nt, Human
uuaacccaauuguugcaacccc

SEQ ID NO: 1384355 - RNA, 20 nt, Human
uuagccgggcgugauggugc

SEQ ID NO: 1384356 - RNA, 24 nt, Human
uuagccgggcgugauggugcacgc

SEQ ID NO: 1384357 - RNA, 24 nt, Human
uuaguagagacgguguuucaccau

SEQ ID NO: 1384358 - RNA, 20 nt, Human
uucagaggcaaacauaaauc

SEQ ID NO: 1384359 - RNA, 22 nt, Human
uucagcaggaaaaaaaugcaua

SEQ ID NO: 1384360 - RNA, 18 nt, Human
uuccagcgauucuccugc

SEQ ID NO: 1384361 - RNA, 18 nt, Human
uucucuuucacuagaaag

SEQ ID NO: 1384362 - RNA, 24 nt, Human
uugcccaggcuggaguacaguggu

SEQ ID NO: 1384363 - RNA, 25 nt, Human
uugggaggcugaggcaugagaauca

SEQ ID NO: 1384364 - RNA, 23 nt, Human
uuuaaacaaacaaaacaaaauaa

SEQ ID NO: 1384365 - RNA, 24 nt, Human
uuucaccauguuggccaggcuggu

SEQ ID NO: 1384366 - RNA, 24 nt, Human
uuuuuaguagagacgguguuucac

SEQ ID NO: 1384367 - RNA, 22 nt, Human
uuuuuguauuuuuaguagagaa

SEQ ID NO: 1384368 - RNA, 22 nt, Human
uuuuuuuuuuuuuugagaugga

SEQ ID NO: 1384369 - RNA, 23 nt, Human
uuuuuuuuuuuuuuuuuuuuggg

SEQ ID NO: 1384370 - RNA, 19 nt, Human
aaaagacauuuugugaagg

SEQ ID NO: 1384371 - RNA, 23 nt, Human
aagaacaucaaauuagucugaaa

SEQ ID NO: 1384372 - RNA, 23 nt, Human
aagcaaaggacaucuccccggga

SEQ ID NO: 1384373 - RNA, 20 nt, Human
aagggaacauuaaagaacau

SEQ ID NO: 1384374 - RNA, 20 nt, Human
aauaagggaacauuaaagaa

SEQ ID NO: 1384375 - RNA, 20 nt, Human
acaaugcugagaggcauacc

SEQ ID NO: 1384376 - RNA, 22 nt, Human
acauuaaagaacaucaaauuag

SEQ ID NO: 1384377 - RNA, 22 nt, Human
agcgcgcucgaagcgaccgccu

SEQ ID NO: 1384378 - RNA, 19 nt, Human
caaaaguggccgcgggcac

SEQ ID NO: 1384379 - RNA, 21 nt, Human
caaaauucagauguuuaauuu

SEQ ID NO: 1384380 - RNA, 21 nt, Human
caucugagaagcaaaggacau

SEQ ID NO: 1384381 - RNA, 22 nt, Human
cugagaggcauacucuucuuua

SEQ ID NO: 1384382 - RNA, 21 nt, Human
cuuaaagugcauuuacaucug

SEQ ID NO: 1384383 - RNA, 21 nt, Human
gaagcaaaggacaucuccccg

SEQ ID NO: 1384384 - RNA, 22 nt, Human
gccucgccugccccgccacagc

SEQ ID NO: 1384385 - RNA, 24 nt, Human
ucaaaaauaagggaacauuaaaga

SEQ ID NO: 1384386 - RNA, 19 nt, Human
ucacucccuucagggagcu

SEQ ID NO: 1384387 - RNA, 21 nt, Human
ucuccccgggaaggcaaaagu

SEQ ID NO: 1384388 - RNA, 18 nt, Human
ucuuuuuuuuuuuuuuuu

SEQ ID NO: 1384389 - RNA, 22 nt, Human
uuuuuuuuuuuuuuuucuuuuu

SEQ ID NO: 1384390 - RNA, 21 nt, Human
aaaucaucuucagaugcaugg

SEQ ID NO: 1384391 - RNA, 20 nt, Human
acaaagcaccccaucagaag

SEQ ID NO: 1384392 - RNA, 18 nt, Human
acagggcuucaccaguca

SEQ ID NO: 1384393 - RNA, 29 nt, Human
acucuacuggggacuugugggaggcaacu

SEQ ID NO: 1384394 - RNA, 19 nt, Human
aggcagggcggguaacuac

SEQ ID NO: 1384395 - RNA, 18 nt, Human
augcauggucucucuggg

SEQ ID NO: 1384396 - RNA, 23 nt, Human
cacaacagauaccugaacucccu

SEQ ID NO: 1384397 - RNA, 26 nt, Human
caccccaucucuaaacaaagcacccc

SEQ ID NO: 1384398 - RNA, 24 nt, Human
cagcgugauagaagcagauggcac

SEQ ID NO: 1384399 - RNA, 23 nt, Human
cauuuccauuauacacgugggga

SEQ ID NO: 1384400 - RNA, 23 nt, Human
ccacagugacaacaauacacuuu

SEQ ID NO: 1384401 - RNA, 25 nt, Human
cccagaaagaagguagggcugcgcc

SEQ ID NO: 1384402 - RNA, 21 nt, Human
cccaucucuaaacaaagcacc

SEQ ID NO: 1384403 - RNA, 19 nt, Human
ccccaucucuaaacaaagc

SEQ ID NO: 1384404 - RNA, 20 nt, Human
cccucagagcaggagggccc

SEQ ID NO: 1384405 - RNA, 19 nt, Human
cccuccacggccacucgcc

SEQ ID NO: 1384406 - RNA, 18 nt, Human
cccugaaagggaggcagg

SEQ ID NO: 1384407 - RNA, 20 nt, Human
ccuccugcuucaaguccagg

SEQ ID NO: 1384408 - RNA, 25 nt, Human
ccucuugcuaaucagccuuucugac

SEQ ID NO: 1384409 - RNA, 18 nt, Human
ccuguuggggaacaggug

SEQ ID NO: 1384410 - RNA, 22 nt, Human
ccuugcagauaccuccugcuuc

SEQ ID NO: 1384411 - RNA, 21 nt, Human
cgccuuggcgucugacagucc

SEQ ID NO: 1384412 - RNA, 18 nt, Human
cgcugaagacccgccagg

SEQ ID NO: 1384413 - RNA, 21 nt, Human
cgcugaagacccgccaggcac

SEQ ID NO: 1384414 - RNA, 19 nt, Human
cucauacugggaagccucc

SEQ ID NO: 1384415 - RNA, 23 nt, Human
cucccugccuuccucucucugcc

SEQ ID NO: 1384416 - RNA, 18 nt, Human
cuccucaaaaagguccug

SEQ ID NO: 1384417 - RNA, 23 nt, Human
cuccuuccucucugcaggggcca

SEQ ID NO: 1384418 - RNA, 20 nt, Human
cugcgcaggggcuaccgccu

SEQ ID NO: 1384419 - RNA, 21 nt, Human
cuugcagauaccuccugcuuc

SEQ ID NO: 1384420 - RNA, 20 nt, Human
cuugcgccccuccacggcca

SEQ ID NO: 1384421 - RNA, 18 nt, Human
gaauaucuccuccacugg

SEQ ID NO: 1384422 - RNA, 22 nt, Human
gaccacccugaaagggaggcag

SEQ ID NO: 1384423 - RNA, 19 nt, Human
gacugcgcgggcacagagc

SEQ ID NO: 1384424 - RNA, 19 nt, Human
ggaauaucuccuccacugg

SEQ ID NO: 1384425 - RNA, 19 nt, Human
ggcugugggauccagcagc

SEQ ID NO: 1384426 - RNA, 21 nt, Human
gggaacagguggaggcagccg

SEQ ID NO: 1384427 - RNA, 22 nt, Human
ggggaaacugaggcacacgaca

SEQ ID NO: 1384428 - RNA, 19 nt, Human
ggggcgccuuggcgucuga

SEQ ID NO: 1384429 - RNA, 18 nt, Human
guugggagccggcuggcu

SEQ ID NO: 1384430 - RNA, 22 nt, Human
guugggagccggcuggcugugg

SEQ ID NO: 1384431 - RNA, 21 nt, Human
uaaacaaagcaccccaucaga

SEQ ID NO: 1384432 - RNA, 22 nt, Human
uaaacaaagcaccccaucagaa

SEQ ID NO: 1384433 - RNA, 26 nt, Human
uaccugaacucccucagauguaaaag

SEQ ID NO: 1384434 - RNA, 24 nt, Human
uaguucuggcauggacagaaagag

SEQ ID NO: 1384435 - RNA, 21 nt, Human
ucagaaacuggcaaggaaauu

SEQ ID NO: 1384436 - RNA, 21 nt, Human
ucagccuuucugacucuuccc

SEQ ID NO: 1384437 - RNA, 20 nt, Human
ucaggcacagccuuguugcu

SEQ ID NO: 1384438 - RNA, 24 nt, Human
uccagguucuucaauacccaggag

SEQ ID NO: 1384439 - RNA, 19 nt, Human
ucccucagauguaaaacug

SEQ ID NO: 1384440 - RNA, 19 nt, Human
ucgcugaagacccgccagg

SEQ ID NO: 1384441 - RNA, 22 nt, Human
ucgcugaagacccgccaggcac

SEQ ID NO: 1384442 - RNA, 18 nt, Human
ucucuaaacaaagcaccc

SEQ ID NO: 1384443 - RNA, 18 nt, Human
ucucucugccgcaccucu

SEQ ID NO: 1384444 - RNA, 20 nt, Human
ucucugcaggggccagacuc

SEQ ID NO: 1384445 - RNA, 22 nt, Human
ucucugggaccucaugaccacc

SEQ ID NO: 1384446 - RNA, 21 nt, Human
ucugggaccucaugaccaccc

SEQ ID NO: 1384447 - RNA, 21 nt, Human
ugacaacaauacacuuucaug

SEQ ID NO: 1384448 - RNA, 24 nt, Human
ugaggucccauggcauggguguug

SEQ ID NO: 1384449 - RNA, 21 nt, Human
ugccuugcgccccuccacggc

SEQ ID NO: 1384450 - RNA, 18 nt, Human
uggacagaaagagggguu

SEQ ID NO: 1384451 - RNA, 23 nt, Human
uggcaacuccucaaaaagguccu

SEQ ID NO: 1384452 - RNA, 19 nt, Human
uggcauggacagaaagagg

SEQ ID NO: 1384453 - RNA, 23 nt, Human
uggcauggacagaaagagggguu

SEQ ID NO: 1384454 - RNA, 19 nt, Human
uggcauggguguugggagc

SEQ ID NO: 1384455 - RNA, 22 nt, Human
uggcauggguguugggagccgg

SEQ ID NO: 1384456 - RNA, 18 nt, Human
uggggacuugugggaggc

SEQ ID NO: 1384457 - RNA, 24 nt, Human
uugcugaggucccauggcaugggu

SEQ ID NO: 1384458 - RNA, 21 nt, Human
uugggagccggcuggcugugg

SEQ ID NO: 1384459 - RNA, 23 nt, Human
uuuuuuuuuuuuuuuuuuucagg

SEQ ID NO: 1384460 - RNA, 27 nt, Human
aaaaaagaaaaucacacuccacaaaga

SEQ ID NO: 1384461 - RNA, 23 nt, Human
aaaaauaaucaggcuugaauggc

SEQ ID NO: 1384462 - RNA, 18 nt, Human
aaagaaaaucacacucca

SEQ ID NO: 1384463 - RNA, 21 nt, Human
aaauagcuucagcuaccuucu

SEQ ID NO: 1384464 - RNA, 19 nt, Human
aaaugcugguggugggaac

SEQ ID NO: 1384465 - RNA, 18 nt, Human
aaccaaggacacagaaua

SEQ ID NO: 1384466 - RNA, 22 nt, Human
aagaaaaugugaacacaaagca

SEQ ID NO: 1384467 - RNA, 23 nt, Human
aagacuuccuccacucccucugg

SEQ ID NO: 1384468 - RNA, 19 nt, Human
aagcggauucuagaaggcc

SEQ ID NO: 1384469 - RNA, 26 nt, Human
acaaaacccuuagucugcaucacacc

SEQ ID NO: 1384470 - RNA, 20 nt, Human
acaaacuuucauuuuccagg

SEQ ID NO: 1384471 - RNA, 22 nt, Human
acaaauaugugaaaaaagaaaa

SEQ ID NO: 1384472 - RNA, 18 nt, Human
acccaguaaaacacauuu

SEQ ID NO: 1384473 - RNA, 25 nt, Human
acucacccucuccucucuuccuucu

SEQ ID NO: 1384474 - RNA, 20 nt, Human
acugagcauccuuuugagcc

SEQ ID NO: 1384475 - RNA, 23 nt, Human
agaugugacauuacauguccaua

SEQ ID NO: 1384476 - RNA, 18 nt, Human
agcaggcuugcacaacug

SEQ ID NO: 1384477 - RNA, 23 nt, Human
agcuaccuucuccggcccacauc

SEQ ID NO: 1384478 - RNA, 23 nt, Human
agcuucagcuaccuucuccggcc

SEQ ID NO: 1384479 - RNA, 19 nt, Human
aggaagggauuuggucacu

SEQ ID NO: 1384480 - RNA, 19 nt, Human
aggacaaucuuucucacuu

SEQ ID NO: 1384481 - RNA, 21 nt, Human
agggagccacccugggcccua

SEQ ID NO: 1384482 - RNA, 19 nt, Human
aggguucuaacugguugug

SEQ ID NO: 1384483 - RNA, 20 nt, Human
auagcuucagcuaccuucuc

SEQ ID NO: 1384484 - RNA, 22 nt, Human
aucacacuccacaaagauguga

SEQ ID NO: 1384485 - RNA, 24 nt, Human
aucagccaaggguuaagcggauuc

SEQ ID NO: 1384486 - RNA, 23 nt, Human
augcaaagcaacgugaauuucca

SEQ ID NO: 1384487 - RNA, 19 nt, Human
auuagaaaagaaaauguga

SEQ ID NO: 1384488 - RNA, 23 nt, Human
caacugaccaaagacggacacag

SEQ ID NO: 1384489 - RNA, 20 nt, Human
caaggguauaguugcugcgc

SEQ ID NO: 1384490 - RNA, 23 nt, Human
cacaacugaccaaagacggacac

SEQ ID NO: 1384491 - RNA, 19 nt, Human
cacacuccacaaagaugug

SEQ ID NO: 1384492 - RNA, 19 nt, Human
cacccaagacuuccuccac

SEQ ID NO: 1384493 - RNA, 21 nt, Human
cacccucuccucucuuccuuc

SEQ ID NO: 1384494 - RNA, 23 nt, Human
caggaaaugcuacagacucaagg

SEQ ID NO: 1384495 - RNA, 23 nt, Human
caggaaaugcuacagacucaagg

SEQ ID NO: 1384496 - RNA, 21 nt, Human
caguacagcaagauacaggga

SEQ ID NO: 1384497 - RNA, 20 nt, Human
ccacaccacccaagacuucc

SEQ ID NO: 1384498 - RNA, 21 nt, Human
ccacccaagacuuccuccacu

SEQ ID NO: 1384499 - RNA, 22 nt, Human
ccacccaagacuuccuccacuc

SEQ ID NO: 1384500 - RNA, 22 nt, Human
ccaguaaaacacauugcguaaa

SEQ ID NO: 1384501 - RNA, 20 nt, Human
cccacucacccucuccucuc

SEQ ID NO: 1384502 - RNA, 20 nt, Human
ccugcugacauagagguggg

SEQ ID NO: 1384503 - RNA, 20 nt, Human
cgggggagugauguggucag

SEQ ID NO: 1384504 - RNA, 20 nt, Human
cucuuccuucuguccacacc

SEQ ID NO: 1384505 - RNA, 19 nt, Human
cuguucccacugagcaucc

SEQ ID NO: 1384506 - RNA, 22 nt, Human
cuucuggaccuaacaaagugua

SEQ ID NO: 1384507 - RNA, 23 nt, Human
gaaaaccccccaaaaagcacacu

SEQ ID NO: 1384508 - RNA, 20 nt, Human
gaacucgggggagugaugug

SEQ ID NO: 1384509 - RNA, 21 nt, Human
gagccugaggaguagggagcc

SEQ ID NO: 1384510 - RNA, 18 nt, Human
gauugugugugugugugu

SEQ ID NO: 1384511 - RNA, 25 nt, Human
gauugugugugugugugugugugug

SEQ ID NO: 1384512 - RNA, 23 nt, Human
gcaaaguauacucgguggaaccc

SEQ ID NO: 1384513 - RNA, 22 nt, Human
gcaacgugaauuuccauugaaa

SEQ ID NO: 1384514 - RNA, 20 nt, Human
gccuccuggaaccuguguuc

SEQ ID NO: 1384515 - RNA, 20 nt, Human
gcugcccacugagcuugcug

SEQ ID NO: 1384516 - RNA, 19 nt, Human
gcuugcugugagcuuuaca

SEQ ID NO: 1384517 - RNA, 20 nt, Human
ggucaguccugcugacauag

SEQ ID NO: 1384518 - RNA, 21 nt, Human
guaguaugggcagcuccuucu

SEQ ID NO: 1384519 - RNA, 20 nt, Human
guauuuuuuuuuuaauggaa

SEQ ID NO: 1384520 - RNA, 21 nt, Human
gugugugugugugugugugug

SEQ ID NO: 1384521 - RNA, 21 nt, Human
gugugugugugugugugugug

SEQ ID NO: 1384522 - RNA, 23 nt, Human
uaaaacacauugcguaaaucucc

SEQ ID NO: 1384523 - RNA, 23 nt, Human
uaagguccagauucucaauucca

SEQ ID NO: 1384524 - RNA, 22 nt, Human
uacaaauaugugaaaaaagaaa

SEQ ID NO: 1384525 - RNA, 24 nt, Human
uaccccacucacccucuccucucu

SEQ ID NO: 1384526 - RNA, 25 nt, Human
uacucgguggaacccuagcucugug

SEQ ID NO: 1384527 - RNA, 18 nt, Human
uacugcauacaaauaugu

SEQ ID NO: 1384528 - RNA, 23 nt, Human
uaucagaagucccauuucugagg

SEQ ID NO: 1384529 - RNA, 24 nt, Human
uaugugaaaaaagaaaaucacacu

SEQ ID NO: 1384530 - RNA, 25 nt, Human
ucaaggauuauuuuuggggauucac

SEQ ID NO: 1384531 - RNA, 23 nt, Human
ucacaaguggauuucuuuaacca

SEQ ID NO: 1384532 - RNA, 22 nt, Human
ucaggcuugaauggcuuuuccu

SEQ ID NO: 1384533 - RNA, 21 nt, Human
uccaaacuaugaaacugaaga

SEQ ID NO: 1384534 - RNA, 24 nt, Human
uccaaacuaugaaacugaagaagc

SEQ ID NO: 1384535 - RNA, 23 nt, Human
uccacaccacccaagacuuccuc

SEQ ID NO: 1384536 - RNA, 19 nt, Human
uccauaugccauacugagc

SEQ ID NO: 1384537 - RNA, 20 nt, Human
uccauugaaaaccccccaaa

SEQ ID NO: 1384538 - RNA, 21 nt, Human
ucccucauuccagaaaccuau

SEQ ID NO: 1384539 - RNA, 23 nt, Human
ucugcaaaaacaguugaauccau

SEQ ID NO: 1384540 - RNA, 20 nt, Human
ucugcaaaauagaguauccu

SEQ ID NO: 1384541 - RNA, 20 nt, Human
ugaaaaccccccaaaaagca

SEQ ID NO: 1384542 - RNA, 18 nt, Human
ugaacacaaagcaaaaca

SEQ ID NO: 1384543 - RNA, 21 nt, Human
ugaacacaaagcaaaacacgg

SEQ ID NO: 1384544 - RNA, 19 nt, Human
ugaccaaagacggacacag

SEQ ID NO: 1384545 - RNA, 18 nt, Human
ugaccacaaaacccuuag

SEQ ID NO: 1384546 - RNA, 18 nt, Human
ugagauguugcagcugcu

SEQ ID NO: 1384547 - RNA, 26 nt, Human
ugagauugugugugugugugugugug

SEQ ID NO: 1384548 - RNA, 18 nt, Human
ugcacagcacacauugaa

SEQ ID NO: 1384549 - RNA, 24 nt, Human
ugcagcugcugcccacugagcuug

SEQ ID NO: 1384550 - RNA, 26 nt, Human
ugcucauaagaaaguaguaugggcag

SEQ ID NO: 1384551 - RNA, 23 nt, Human
ugcugcgcccuucacaaagggga

SEQ ID NO: 1384552 - RNA, 21 nt, Human
ugggaacucgggggagugaug

SEQ ID NO: 1384553 - RNA, 22 nt, Human
ugggaacucgggggagugaugu

SEQ ID NO: 1384554 - RNA, 22 nt, Human
ugggagggauagaauuguaguu

SEQ ID NO: 1384555 - RNA, 19 nt, Human
ugugaacacaaagcaaaac

SEQ ID NO: 1384556 - RNA, 18 nt, Human
ugugugugugugugugug

SEQ ID NO: 1384557 - RNA, 18 nt, Human
ugugugugugugugugug

SEQ ID NO: 1384558 - RNA, 18 nt, Human
ugugugugugugugugug

SEQ ID NO: 1384559 - RNA, 18 nt, Human
ugugugugugugugugug

SEQ ID NO: 1384560 - RNA, 18 nt, Human
ugugugugugugugugug

SEQ ID NO: 1384561 - RNA, 18 nt, Human
ugugugugugugugugug

SEQ ID NO: 1384562 - RNA, 18 nt, Human
ugugugugugugugugug

SEQ ID NO: 1384563 - RNA, 18 nt, Human
ugugugugugugugugug

SEQ ID NO: 1384564 - RNA, 18 nt, Human
ugugugugugugugugug

SEQ ID NO: 1384565 - RNA, 18 nt, Human
ugugugugugugugugug

SEQ ID NO: 1384566 - RNA, 21 nt, Human
ugugugugugugugugugugu

SEQ ID NO: 1384567 - RNA, 21 nt, Human
ugugugugugugugugugugu

SEQ ID NO: 1384568 - RNA, 21 nt, Human
ugugugugugugugugugugu

SEQ ID NO: 1384569 - RNA, 21 nt, Human
ugugugugugugugugugugu

SEQ ID NO: 1384570 - RNA, 21 nt, Human
ugugugugugugugugugugu

SEQ ID NO: 1384571 - RNA, 21 nt, Human
ugugugugugugugugugugu

SEQ ID NO: 1384572 - RNA, 21 nt, Human
ugugugugugugugugugugu

SEQ ID NO: 1384573 - RNA, 21 nt, Human
ugugugugugugugugugugu

SEQ ID NO: 1384574 - RNA, 21 nt, Human
ugugugugugugugugugugu

SEQ ID NO: 1384575 - RNA, 21 nt, Human
ugugugugugugugugugugu

SEQ ID NO: 1384576 - RNA, 21 nt, Human
ugugugugugugugugugugu

SEQ ID NO: 1384577 - RNA, 21 nt, Human
ugugugugugugugugugugu

SEQ ID NO: 1384578 - RNA, 21 nt, Human
ugugugugugugugugugugu

SEQ ID NO: 1384579 - RNA, 21 nt, Human
ugugugugugugugugugugu

SEQ ID NO: 1384580 - RNA, 21 nt, Human
ugugugugugugugugugugu

SEQ ID NO: 1384581 - RNA, 21 nt, Human
ugugugugugugugugugugu

SEQ ID NO: 1384582 - RNA, 22 nt, Human
ugugugugugugugugugugua

SEQ ID NO: 1384583 - RNA, 22 nt, Human
ugugugugugugugugugugug

SEQ ID NO: 1384584 - RNA, 22 nt, Human
ugugugugugugugugugugug

SEQ ID NO: 1384585 - RNA, 22 nt, Human
ugugugugugugugugugugug

SEQ ID NO: 1384586 - RNA, 22 nt, Human
ugugugugugugugugugugug

SEQ ID NO: 1384587 - RNA, 22 nt, Human
ugugugugugugugugugugug

SEQ ID NO: 1384588 - RNA, 21 nt, Human
uuagaaaauguuggacaaccu

SEQ ID NO: 1384589 - RNA, 21 nt, Human
uuauuuuuggggauucaccau

SEQ ID NO: 1384590 - RNA, 27 nt, Human
uuggcaauguggaauucagcuuucuuu

SEQ ID NO: 1384591 - RNA, 18 nt, Human
uuuaacaguacagcaaga

SEQ ID NO: 1384592 - RNA, 19 nt, Human
uuuagaauauccucacccc

SEQ ID NO: 1384593 - RNA, 25 nt, Human
uuucuacauucugcaaaaacaguug

SEQ ID NO: 1384594 - RNA, 20 nt, Human
aaaggaaaauaauagcgagg

SEQ ID NO: 1384595 - RNA, 27 nt, Human
aagcaaaagcuucugugaacugugauc

SEQ ID NO: 1384596 - RNA, 28 nt, Human
aagcauacagcccccucaccugcaagcc

SEQ ID NO: 1384597 - RNA, 22 nt, Human
aagggaaugaagggaaaaggaa

SEQ ID NO: 1384598 - RNA, 19 nt, Human
acucagugacggcuccugg

SEQ ID NO: 1384599 - RNA, 21 nt, Human
agcacagggcccacccucuca

SEQ ID NO: 1384600 - RNA, 23 nt, Human
agcagguacucagggugcugguc

SEQ ID NO: 1384601 - RNA, 24 nt, Human
agcccagccacacucaaccccugg

SEQ ID NO: 1384602 - RNA, 21 nt, Human
agcccccucaccugcaagccc

SEQ ID NO: 1384603 - RNA, 19 nt, Human
aggaagagcgggucugaga

SEQ ID NO: 1384604 - RNA, 19 nt, Human
aggcauagaggaggccagc

SEQ ID NO: 1384605 - RNA, 21 nt, Human
aguuccugaagcauacagccc

SEQ ID NO: 1384606 - RNA, 20 nt, Human
aucucacaagcacuugguug

SEQ ID NO: 1384607 - RNA, 25 nt, Human
aucuggcucagccaggucucccagg

SEQ ID NO: 1384608 - RNA, 18 nt, Human
augaagggaaaaggaaga

SEQ ID NO: 1384609 - RNA, 23 nt, Human
auggcugacucucaagggaauga

SEQ ID NO: 1384610 - RNA, 19 nt, Human
cacacaguccuaucgauaa

SEQ ID NO: 1384611 - RNA, 20 nt, Human
caccccaguguucacuccca

SEQ ID NO: 1384612 - RNA, 22 nt, Human
caccugcaagccccgccucagc

SEQ ID NO: 1384613 - RNA, 19 nt, Human
cacuugccagggcagcuuc

SEQ ID NO: 1384614 - RNA, 21 nt, Human
cagggcagcuucaguuccugc

SEQ ID NO: 1384615 - RNA, 23 nt, Human
cagugacggcuccugguuccuca

SEQ ID NO: 1384616 - RNA, 18 nt, Human
caucuggcucagccaggu

SEQ ID NO: 1384617 - RNA, 20 nt, Human
caugcgcccuuacccuuacc

SEQ ID NO: 1384618 - RNA, 18 nt, Human
cauuccaugcgcccuuac

SEQ ID NO: 1384619 - RNA, 21 nt, Human
cauuccaugcgcccuuacccu

SEQ ID NO: 1384620 - RNA, 18 nt, Human
ccagugccgcacggccga

SEQ ID NO: 1384621 - RNA, 18 nt, Human
ccccccagcacagggccc

SEQ ID NO: 1384622 - RNA, 20 nt, Human
ccugcaagccccgccucagc

SEQ ID NO: 1384623 - RNA, 28 nt, Human
cgauaacuuccagcagauaacccaagug

SEQ ID NO: 1384624 - RNA, 24 nt, Human
cgccucagcgcacacccuugccag

SEQ ID NO: 1384625 - RNA, 19 nt, Human
cggcuccugguuccucacu

SEQ ID NO: 1384626 - RNA, 19 nt, Human
cucaagggaaugaagggaa

SEQ ID NO: 1384627 - RNA, 18 nt, Human
cucagcgcacacccuugc

SEQ ID NO: 1384628 - RNA, 21 nt, Human
cucaucgcaguaucaaaauaa

SEQ ID NO: 1384629 - RNA, 22 nt, Human
cuguuaggugagcucauuccug

SEQ ID NO: 1384630 - RNA, 22 nt, Human
cuuacucaucgcaguaucaaaa

SEQ ID NO: 1384631 - RNA, 21 nt, Human
gaaugggcucugcugagaucu

SEQ ID NO: 1384632 - RNA, 23 nt, Human
gacacauuugcuaucuguuaggu

SEQ ID NO: 1384633 - RNA, 21 nt, Human
gagguccagugccgcacggcc

SEQ ID NO: 1384634 - RNA, 21 nt, Human
ggccgagggaggucaggaacc

SEQ ID NO: 1384635 - RNA, 25 nt, Human
ggguggaagccaggucucgguuccu

SEQ ID NO: 1384636 - RNA, 24 nt, Human
ucacucccaccuuagccccauucc

SEQ ID NO: 1384637 - RNA, 19 nt, Human
ucagcgcacacccuugcca

SEQ ID NO: 1384638 - RNA, 27 nt, Human
ucccgcugcguuacugaaaggucggac

SEQ ID NO: 1384639 - RNA, 26 nt, Human
ucccgcugcguuacugaaaggucggc

SEQ ID NO: 1384640 - RNA, 23 nt, Human
uccugccgcggugucagugcaga

SEQ ID NO: 1384641 - RNA, 18 nt, Human
ucugcugagaucuaacca

SEQ ID NO: 1384642 - RNA, 22 nt, Human
ugaacaccucccaucaugccuc

SEQ ID NO: 1384643 - RNA, 18 nt, Human
ugaagggaaaaggaagag

SEQ ID NO: 1384644 - RNA, 23 nt, Human
ugaagggaaaaggaagagcgggu

SEQ ID NO: 1384645 - RNA, 21 nt, Human
ugacccaaggccccccagcac

SEQ ID NO: 1384646 - RNA, 19 nt, Human
ugagcucauuccuggaacc

SEQ ID NO: 1384647 - RNA, 20 nt, Human
ugcagaaugggcucugcuga

SEQ ID NO: 1384648 - RNA, 20 nt, Human
ugccagguuggaggaagucc

SEQ ID NO: 1384649 - RNA, 22 nt, Human
ugccgcacggccgagggagguc

SEQ ID NO: 1384650 - RNA, 20 nt, Human
ugugugugacccaaggcccc

SEQ ID NO: 1384651 - RNA, 21 nt, Human
uuacucaucgcaguaucaaaa

SEQ ID NO: 1384652 - RNA, 21 nt, Human
uucacucccaccuuagcccca

SEQ ID NO: 1384653 - RNA, 22 nt, Human
uugcuuuguuuuugcaguguca

SEQ ID NO: 1384654 - RNA, 22 nt, Human
gcaguagacgcagcaaagaaag

SEQ ID NO: 1384655 - RNA, 20 nt, Human
gucuuaagugucaucuggcc

SEQ ID NO: 1384656 - RNA, 24 nt, Human
ucuuaagugucaucuggcaucuuc

SEQ ID NO: 1384657 - RNA, 22 nt, Human
aaaaaaaaaaaauuaaaccaac

SEQ ID NO: 1384658 - RNA, 26 nt, Human
aaaaaaaaaaauuaaaccaacaauug

SEQ ID NO: 1384659 - RNA, 22 nt, Human
aaacccaagggacagacugaug

SEQ ID NO: 1384660 - RNA, 19 nt, Human
aaagcuagaccaaugccuu

SEQ ID NO: 1384661 - RNA, 20 nt, Human
aacccaucgaaaucuucccc

SEQ ID NO: 1384662 - RNA, 18 nt, Human
aagcaagaauguggaacc

SEQ ID NO: 1384663 - RNA, 22 nt, Human
aagcaagaauguggaacccauc

SEQ ID NO: 1384664 - RNA, 19 nt, Human
aagcgccucgggaacccca

SEQ ID NO: 1384665 - RNA, 18 nt, Human
aagcucucccugccuccc

SEQ ID NO: 1384666 - RNA, 18 nt, Human
aaggacucaggccugggg

SEQ ID NO: 1384667 - RNA, 22 nt, Human
aaggcccagcccagaggacccu

SEQ ID NO: 1384668 - RNA, 22 nt, Human
acaagcucucccugccuccccu

SEQ ID NO: 1384669 - RNA, 21 nt, Human
acaauuggcugccuucugacc

SEQ ID NO: 1384670 - RNA, 18 nt, Human
acagcgaaaccccgucuc

SEQ ID NO: 1384671 - RNA, 26 nt, Human
acuaaagcaagaauguggaacccagu

SEQ ID NO: 1384672 - RNA, 18 nt, Human
acuacacuccagccuggg

SEQ ID NO: 1384673 - RNA, 24 nt, Human
acuacacuccagccugggaaacag

SEQ ID NO: 1384674 - RNA, 24 nt, Human
agaaauaaagaaaggaaucccagc

SEQ ID NO: 1384675 - RNA, 22 nt, Human
agaccccagcccuggaccagga

SEQ ID NO: 1384676 - RNA, 22 nt, Human
agaguagcuugcaaaacccaag

SEQ ID NO: 1384677 - RNA, 24 nt, Human
agcacuuugggaggccgaggcggg

SEQ ID NO: 1384678 - RNA, 22 nt, Human
agcguggggcuagggcaguggg

SEQ ID NO: 1384679 - RNA, 20 nt, Human
aggaguuugagaccagccug

SEQ ID NO: 1384680 - RNA, 24 nt, Human
aggccgaggcgggagguucacuug

SEQ ID NO: 1384681 - RNA, 20 nt, Human
aggcggcgggcgcccaggaa

SEQ ID NO: 1384682 - RNA, 18 nt, Human
aggcgggagguucacuug

SEQ ID NO: 1384683 - RNA, 18 nt, Human
aguagcuugcaaaaccca

SEQ ID NO: 1384684 - RNA, 19 nt, Human
agugggggaagguggggag

SEQ ID NO: 1384685 - RNA, 20 nt, Human
agugggucaggcaccauccc

SEQ ID NO: 1384686 - RNA, 18 nt, Human
cacaccuguaguaccagc

SEQ ID NO: 1384687 - RNA, 19 nt, Human
cacagccugcagcuccccc

SEQ ID NO: 1384688 - RNA, 19 nt, Human
caccuguaguaccagcuac

SEQ ID NO: 1384689 - RNA, 22 nt, Human
caccuguaguaccagcuacuca

SEQ ID NO: 1384690 - RNA, 18 nt, Human
cacuacacuccagccugg

SEQ ID NO: 1384691 - RNA, 19 nt, Human
cacuacacuccagccuggg

SEQ ID NO: 1384692 - RNA, 24 nt, Human
cacuacacuccagccugggaaaca

SEQ ID NO: 1384693 - RNA, 21 nt, Human
cagacugauggggaaaauccc

SEQ ID NO: 1384694 - RNA, 18 nt, Human
cagcacugaaggucccac

SEQ ID NO: 1384695 - RNA, 23 nt, Human
cagcacugaaggucccacaagcu

SEQ ID NO: 1384696 - RNA, 22 nt, Human
cagcacuuugggaggccgaggc

SEQ ID NO: 1384697 - RNA, 24 nt, Human
cagcacuuugggaggccgaggcgg

SEQ ID NO: 1384698 - RNA, 20 nt, Human
cagcccagaggacccugcgg

SEQ ID NO: 1384699 - RNA, 22 nt, Human
caggagccggagcgggacagcg

SEQ ID NO: 1384700 - RNA, 25 nt, Human
caggagccggagcgggacagcggag

SEQ ID NO: 1384701 - RNA, 23 nt, Human
cagugggucaggcaccaucccuu

SEQ ID NO: 1384702 - RNA, 19 nt, Human
caucccuucugcaaguggc

SEQ ID NO: 1384703 - RNA, 22 nt, Human
cauccuguauaggaauggaaau

SEQ ID NO: 1384704 - RNA, 18 nt, Human
ccaggacggggagaacaa

SEQ ID NO: 1384705 - RNA, 21 nt, Human
cccaaaucccucuacaacaac

SEQ ID NO: 1384706 - RNA, 19 nt, Human
cccacaagcucucccugcc

SEQ ID NO: 1384707 - RNA, 22 nt, Human
cccagcccagaggacccugcgg

SEQ ID NO: 1384708 - RNA, 21 nt, Human
cccaucgaaaucuucccccaa

SEQ ID NO: 1384709 - RNA, 22 nt, Human
ccccaaaaugccaaccauaaaa

SEQ ID NO: 1384710 - RNA, 25 nt, Human
ccccaaggcccagcccagaggaccc

SEQ ID NO: 1384711 - RNA, 18 nt, Human
ccccagccgggccggccc

SEQ ID NO: 1384712 - RNA, 28 nt, Human
cccccaaaaugccaaccauaaaauagag

SEQ ID NO: 1384713 - RNA, 19 nt, Human
cccccaguggagcaagaaa

SEQ ID NO: 1384714 - RNA, 20 nt, Human
cccccaguggagcaagaaaa

SEQ ID NO: 1384715 - RNA, 19 nt, Human
cccccugcaggcgauucag

SEQ ID NO: 1384716 - RNA, 24 nt, Human
cccucuacaacaacuaaagcaaga

SEQ ID NO: 1384717 - RNA, 23 nt, Human
cccugcggccucuuacagacccc

SEQ ID NO: 1384718 - RNA, 20 nt, Human
ccggagcgggacagcggagg

SEQ ID NO: 1384719 - RNA, 18 nt, Human
ccuccaaagauagguuca

SEQ ID NO: 1384720 - RNA, 27 nt, Human
ccucgggaaccccagccgggccggccc

SEQ ID NO: 1384721 - RNA, 22 nt, Human
ccucuacaacaacuaaagcaag

SEQ ID NO: 1384722 - RNA, 21 nt, Human
ccugggaacagcgaaaccccg

SEQ ID NO: 1384723 - RNA, 19 nt, Human
ccuguaguaccagcuacuc

SEQ ID NO: 1384724 - RNA, 22 nt, Human
cuaaagcaagaauguggaaccc

SEQ ID NO: 1384725 - RNA, 18 nt, Human
cuaacaccagucucacac

SEQ ID NO: 1384726 - RNA, 21 nt, Human
cuacagaaauaaagaaaggaa

SEQ ID NO: 1384727 - RNA, 18 nt, Human
cuacucacuaccugggag

SEQ ID NO: 1384728 - RNA, 27 nt, Human
cucaaaaaaaaaaaaaaauuaaaccaa

SEQ ID NO: 1384729 - RNA, 19 nt, Human
cucacuaccugggaggcug

SEQ ID NO: 1384730 - RNA, 19 nt, Human
cugaaggucccacaagcuc

SEQ ID NO: 1384731 - RNA, 19 nt, Human
cugcagcucccccugcagg

SEQ ID NO: 1384732 - RNA, 22 nt, Human
cugucucaaaaaaaaaaaaaaa

SEQ ID NO: 1384733 - RNA, 23 nt, Human
cuuaaaaccuccuuacccaaccc

SEQ ID NO: 1384734 - RNA, 22 nt, Human
gaacagcgaaaccccgucucua

SEQ ID NO: 1384735 - RNA, 24 nt, Human
gagccggagcgggacagcggaggc

SEQ ID NO: 1384736 - RNA, 22 nt, Human
gcccaggaguuugagaccagcc

SEQ ID NO: 1384737 - RNA, 25 nt, Human
gccccaaggcccagcccagaggacc

SEQ ID NO: 1384738 - RNA, 26 nt, Human
gccccaggagccggagcgggacagcg

SEQ ID NO: 1384739 - RNA, 22 nt, Human
gccucgggaaccccagccgggc

SEQ ID NO: 1384740 - RNA, 18 nt, Human
gcgccucgggaaccccag

SEQ ID NO: 1384741 - RNA, 19 nt, Human
gcggggagccccaggagcc

SEQ ID NO: 1384742 - RNA, 18 nt, Human
gcuaacaccagucucaca

SEQ ID NO: 1384743 - RNA, 19 nt, Human
ggaaugugggagcugcccc

SEQ ID NO: 1384744 - RNA, 24 nt, Human
ggcagcacacaccuguaguaccag

SEQ ID NO: 1384745 - RNA, 23 nt, Human
gggaaccccagccgggccggccc

SEQ ID NO: 1384746 - RNA, 22 nt, Human
gggagguucacuugagcccagg

SEQ ID NO: 1384747 - RNA, 26 nt, Human
gggcaggaaucugaacucugccugag

SEQ ID NO: 1384748 - RNA, 18 nt, Human
gggggaagguggggagcu

SEQ ID NO: 1384749 - RNA, 22 nt, Human
gggggaagguggggagcuugaa

SEQ ID NO: 1384750 - RNA, 22 nt, Human
ggucaccacagugggggaaggu

SEQ ID NO: 1384751 - RNA, 21 nt, Human
ggugggagcaucuuuugagcc

SEQ ID NO: 1384752 - RNA, 18 nt, Human
guggagcaagaaaagcag

SEQ ID NO: 1384753 - RNA, 24 nt, Human
guucacuugagcccaggaguuuga

SEQ ID NO: 1384754 - RNA, 18 nt, Human
uaaagaaaggaaucccag

SEQ ID NO: 1384755 - RNA, 21 nt, Human
uaaagaccccagcccuggacc

SEQ ID NO: 1384756 - RNA, 20 nt, Human
uaaagcaagaauguggaacc

SEQ ID NO: 1384757 - RNA, 21 nt, Human
uaaagcaagaauguggaaccc

SEQ ID NO: 1384758 - RNA, 24 nt, Human
uaaagcaagaauguggaacccauc

SEQ ID NO: 1384759 - RNA, 18 nt, Human
uaacaccagucucacaca

SEQ ID NO: 1384760 - RNA, 19 nt, Human
uacaacaacuaaagcaaga

SEQ ID NO: 1384761 - RNA, 21 nt, Human
uacccaacccuugcuaaggac

SEQ ID NO: 1384762 - RNA, 23 nt, Human
uagaaacacccaaaucccucuac

SEQ ID NO: 1384763 - RNA, 20 nt, Human
uaggaaaagcuagaccaaug

SEQ ID NO: 1384764 - RNA, 18 nt, Human
uagggcagugggucaggc

SEQ ID NO: 1384765 - RNA, 20 nt, Human
uauaaaacaaggugcaucca

SEQ ID NO: 1384766 - RNA, 20 nt, Human
uauauaaaacaaggugcauc

SEQ ID NO: 1384767 - RNA, 19 nt, Human
ucacuacacuccagccugg

SEQ ID NO: 1384768 - RNA, 19 nt, Human
ucacuugagcccaggaguu

SEQ ID NO: 1384769 - RNA, 22 nt, Human
ucccccaaaaugccaaccauaa

SEQ ID NO: 1384770 - RNA, 19 nt, Human
ucccugccuccccucuauc

SEQ ID NO: 1384771 - RNA, 22 nt, Human
ucccuucugcaaguggccacag

SEQ ID NO: 1384772 - RNA, 25 nt, Human
ucuaaagaccccagcccuggaccag

SEQ ID NO: 1384773 - RNA, 19 nt, Human
ucucuaaagaccccagccc

SEQ ID NO: 1384774 - RNA, 18 nt, Human
ucuuacagaccccggagg

SEQ ID NO: 1384775 - RNA, 23 nt, Human
ugacuguaucacuacacuccagc

SEQ ID NO: 1384776 - RNA, 23 nt, Human
ugagcccaggaguuugagaccag

SEQ ID NO: 1384777 - RNA, 23 nt, Human
ugcagugagcgguggcuaacacc

SEQ ID NO: 1384778 - RNA, 23 nt, Human
ugcauagcguggggcuagggcag

SEQ ID NO: 1384779 - RNA, 23 nt, Human
ugccuccccucuaucuacugguc

SEQ ID NO: 1384780 - RNA, 18 nt, Human
uggaaguggcuccagcca

SEQ ID NO: 1384781 - RNA, 20 nt, Human
uggaaguggcuccagccagg

SEQ ID NO: 1384782 - RNA, 24 nt, Human
uggaaguggcuccagccccgaccc

SEQ ID NO: 1384783 - RNA, 19 nt, Human
uggccacaggucaccacag

SEQ ID NO: 1384784 - RNA, 21 nt, Human
uggcuaacaccagucucacac

SEQ ID NO: 1384785 - RNA, 23 nt, Human
uggcuccagccaggggauggggg

SEQ ID NO: 1384786 - RNA, 21 nt, Human
ugggaacagcgaaaccccguc

SEQ ID NO: 1384787 - RNA, 19 nt, Human
ugggagcugccccaaggcc

SEQ ID NO: 1384788 - RNA, 23 nt, Human
ugggagcugccccaaggcccagc

SEQ ID NO: 1384789 - RNA, 19 nt, Human
ugggaggccgaggcgggag

SEQ ID NO: 1384790 - RNA, 18 nt, Human
ugggaggcugugguggga

SEQ ID NO: 1384791 - RNA, 23 nt, Human
uucacuugagcccaggaguuuga

SEQ ID NO: 1384792 - RNA, 22 nt, Human
uugagcccaggaguuugagacc

SEQ ID NO: 1384793 - RNA, 19 nt, Human
aaagugcuaggauuacaga

SEQ ID NO: 1384794 - RNA, 24 nt, Human
aaagugcugggauuacagguguga

SEQ ID NO: 1384795 - RNA, 20 nt, Human
aaccuccgccucccagcuuc

SEQ ID NO: 1384796 - RNA, 24 nt, Human
aagacuccucccacugaguaacag

SEQ ID NO: 1384797 - RNA, 20 nt, Human
aagagucuaagaucaaggug

SEQ ID NO: 1384798 - RNA, 18 nt, Human
aagauuugaaggcugaag

SEQ ID NO: 1384799 - RNA, 25 nt, Human
aagcgauccucccaucuuggccucc

SEQ ID NO: 1384800 - RNA, 24 nt, Human
aagcuggucucgagccgugacaca

SEQ ID NO: 1384801 - RNA, 26 nt, Human
aagugcuaggauuacagacuucagcc

SEQ ID NO: 1384802 - RNA, 18 nt, Human
aagugcugggauuacagg

SEQ ID NO: 1384803 - RNA, 19 nt, Human
aagugcugggauuacaggu

SEQ ID NO: 1384804 - RNA, 26 nt, Human
aagugcugggauuacaggugugagcc

SEQ ID NO: 1384805 - RNA, 26 nt, Human
aaucaucuuguucuuccccuuccccu

SEQ ID NO: 1384806 - RNA, 23 nt, Human
aaucccucccaaaggcccacuuc

SEQ ID NO: 1384807 - RNA, 24 nt, Human
aaucgcuugaacccgggaggcgga

SEQ ID NO: 1384808 - RNA, 21 nt, Human
acaacacacauuuauuccuca

SEQ ID NO: 1384809 - RNA, 24 nt, Human
acagagcgagacuccaucucaaaa

SEQ ID NO: 1384810 - RNA, 21 nt, Human
acaggguuucaccauguuggu

SEQ ID NO: 1384811 - RNA, 23 nt, Human
acaggguuucaccauguugguca

SEQ ID NO: 1384812 - RNA, 24 nt, Human
acaggguuucaccauguuggucag

SEQ ID NO: 1384813 - RNA, 23 nt, Human
accauguuggucaggcuggucuc

SEQ ID NO: 1384814 - RNA, 25 nt, Human
acccgccuuggccucccaaagugcu

SEQ ID NO: 1384815 - RNA, 24 nt, Human
acccggcugauuuuuguauuuuua

SEQ ID NO: 1384816 - RNA, 24 nt, Human
accuugugauccaccugccucagc

SEQ ID NO: 1384817 - RNA, 19 nt, Human
acgggguuuugccaugugg

SEQ ID NO: 1384818 - RNA, 23 nt, Human
acgggguuuugccauguggccag

SEQ ID NO: 1384819 - RNA, 19 nt, Human
acuacaggugcaugccacc

SEQ ID NO: 1384820 - RNA, 23 nt, Human
acugcccuccagccuggugacag

SEQ ID NO: 1384821 - RNA, 25 nt, Human
acugcccuccagccuggugacagag

SEQ ID NO: 1384822 - RNA, 18 nt, Human
acugcccuuuuuuuuuuu

SEQ ID NO: 1384823 - RNA, 18 nt, Human
acuuagugacucagacua

SEQ ID NO: 1384824 - RNA, 19 nt, Human
agaacaaaaccccccaaac

SEQ ID NO: 1384825 - RNA, 21 nt, Human
agauacaaacauucagucugc

SEQ ID NO: 1384826 - RNA, 22 nt, Human
agcacagaacaaaaccccccaa

SEQ ID NO: 1384827 - RNA, 21 nt, Human
agccuggugacagagcgagac

SEQ ID NO: 1384828 - RNA, 23 nt, Human
agccuggugacagagcgagacuc

SEQ ID NO: 1384829 - RNA, 27 nt, Human
agcuagaguucuagcagaaguugccug

SEQ ID NO: 1384830 - RNA, 23 nt, Human
agcuggauacaguggugcgauca

SEQ ID NO: 1384831 - RNA, 23 nt, Human
agcugggcaugguggcaugugcu

SEQ ID NO: 1384832 - RNA, 21 nt, Human
agcuucaagugauucuccugc

SEQ ID NO: 1384833 - RNA, 22 nt, Human
agcuucaagugauucuccugcc

SEQ ID NO: 1384834 - RNA, 26 nt, Human
aggaagauuugaagauuugaaggcug

SEQ ID NO: 1384835 - RNA, 22 nt, Human
aggacacagugaggccagcuug

SEQ ID NO: 1384836 - RNA, 24 nt, Human
aggcaggagaaucgcuugaacccg

SEQ ID NO: 1384837 - RNA, 24 nt, Human
aggcggagguugcagugagcugag

SEQ ID NO: 1384838 - RNA, 20 nt, Human
aggcugaggcaggagaaucg

SEQ ID NO: 1384839 - RNA, 24 nt, Human
aggcugaggcaggagaaucgcuug

SEQ ID NO: 1384840 - RNA, 24 nt, Human
aggguauccacccgccuuggccuc

SEQ ID NO: 1384841 - RNA, 25 nt, Human
aggugcuggcaaauuccauucugcu

SEQ ID NO: 1384842 - RNA, 23 nt, Human
aggugugagccaccgugccuggc

SEQ ID NO: 1384843 - RNA, 24 nt, Human
agguuguuuccaaucuguagcuau

SEQ ID NO: 1384844 - RNA, 22 nt, Human
aguagagacaggguuucaccau

SEQ ID NO: 1384845 - RNA, 18 nt, Human
aguagcugggacuacagg

SEQ ID NO: 1384846 - RNA, 18 nt, Human
aguagcugggauuacagg

SEQ ID NO: 1384847 - RNA, 26 nt, Human
agucaucagcucacccaagauucaga

SEQ ID NO: 1384848 - RNA, 24 nt, Human
agugauucuccugccucagccucc

SEQ ID NO: 1384849 - RNA, 21 nt, Human
auccacccgccuuggccuccc

SEQ ID NO: 1384850 - RNA, 24 nt, Human
aucgcaccacugcccuccagccug

SEQ ID NO: 1384851 - RNA, 20 nt, Human
auguacauaacucgucuucc

SEQ ID NO: 1384852 - RNA, 18 nt, Human
auucuccugccucagccu

SEQ ID NO: 1384853 - RNA, 20 nt, Human
auuuuuguauuuuuaguaga

SEQ ID NO: 1384854 - RNA, 22 nt, Human
auuuuuguauuuuuaguagaga

SEQ ID NO: 1384855 - RNA, 22 nt, Human
auuuuuguauuuuuaguagaga

SEQ ID NO: 1384856 - RNA, 24 nt, Human
auuuuuguauuuuuaguagagaca

SEQ ID NO: 1384857 - RNA, 21 nt, Human
caaaaaaaaauuagcugggca

SEQ ID NO: 1384858 - RNA, 23 nt, Human
caaacuccugaccuugugaucca

SEQ ID NO: 1384859 - RNA, 24 nt, Human
caaagugcugggauuacaggugug

SEQ ID NO: 1384860 - RNA, 23 nt, Human
caaauggcacagagaagaagcug

SEQ ID NO: 1384861 - RNA, 27 nt, Human
caagcgauccucccaucuuggccuccc

SEQ ID NO: 1384862 - RNA, 21 nt, Human
caagggccugacuucuggugu

SEQ ID NO: 1384863 - RNA, 22 nt, Human
caagugauucuccugccucagc

SEQ ID NO: 1384864 - RNA, 22 nt, Human
cacagaacaaaaccccccaaac

SEQ ID NO: 1384865 - RNA, 24 nt, Human
caccacacccggcugauuuuugua

SEQ ID NO: 1384866 - RNA, 21 nt, Human
caccauguuggucaggcuggu

SEQ ID NO: 1384867 - RNA, 24 nt, Human
caccauguuggucaggcuggucuc

SEQ ID NO: 1384868 - RNA, 23 nt, Human
cacccgccuuggccucccaaagu

SEQ ID NO: 1384869 - RNA, 24 nt, Human
cacccgccuuggccucccaaagug

SEQ ID NO: 1384870 - RNA, 23 nt, Human
caccugccucagccucccaaagu

SEQ ID NO: 1384871 - RNA, 21 nt, Human
cacugcaaccuccgccuccca

SEQ ID NO: 1384872 - RNA, 21 nt, Human
cacugcaaccucugccucccg

SEQ ID NO: 1384873 - RNA, 23 nt, Human
cacugcaaccucugccucccggg

SEQ ID NO: 1384874 - RNA, 23 nt, Human
cacugcccuccagccuggugaca

SEQ ID NO: 1384875 - RNA, 23 nt, Human
cacugcccuccagccuggugaca

SEQ ID NO: 1384876 - RNA, 26 nt, Human
cacugcccuuuuuuuuuuuuuuuuuu

SEQ ID NO: 1384877 - RNA, 21 nt, Human
cagaacaaaaccccccaaacc

SEQ ID NO: 1384878 - RNA, 22 nt, Human
cagaacaaaaccccccaaaccu

SEQ ID NO: 1384879 - RNA, 21 nt, Human
cagagaagaagcaagcucuca

SEQ ID NO: 1384880 - RNA, 21 nt, Human
cagagggcuucguuagagcuc

SEQ ID NO: 1384881 - RNA, 23 nt, Human
cagcauggcagccucuaagcaga

SEQ ID NO: 1384882 - RNA, 20 nt, Human
cagcuucaagugauucuccu

SEQ ID NO: 1384883 - RNA, 21 nt, Human
caggcaggacacagugaggcc

SEQ ID NO: 1384884 - RNA, 22 nt, Human
caggcaggacacagugaggcca

SEQ ID NO: 1384885 - RNA, 24 nt, Human
caggguuucaccauguuggucagg

SEQ ID NO: 1384886 - RNA, 19 nt, Human
caguggcacgaucuuggcu

SEQ ID NO: 1384887 - RNA, 24 nt, Human
caugccaccacacccggcugauuu

SEQ ID NO: 1384888 - RNA, 19 nt, Human
ccaaagugcuaggauuaca

SEQ ID NO: 1384889 - RNA, 21 nt, Human
ccaaagugcugggauuacagg

SEQ ID NO: 1384890 - RNA, 21 nt, Human
ccaaagugcugggauuacagg

SEQ ID NO: 1384891 - RNA, 24 nt, Human
ccaaagugcugggauuacaggugu

SEQ ID NO: 1384892 - RNA, 22 nt, Human
ccaccacagguuguuuccaauc

SEQ ID NO: 1384893 - RNA, 19 nt, Human
ccaccugccucagccuccc

SEQ ID NO: 1384894 - RNA, 19 nt, Human
ccacugcccuccagccugg

SEQ ID NO: 1384895 - RNA, 19 nt, Human
ccacugcccuccagccugg

SEQ ID NO: 1384896 - RNA, 20 nt, Human
ccacugcccuccagccuggu

SEQ ID NO: 1384897 - RNA, 23 nt, Human
ccacugcccuccagccuggugac

SEQ ID NO: 1384898 - RNA, 23 nt, Human
ccacuuccaaauaacaucaccuu

SEQ ID NO: 1384899 - RNA, 19 nt, Human
ccagcuuguuucuacucug

SEQ ID NO: 1384900 - RNA, 24 nt, Human
ccaucucaaaaaaaaaaaaaaaaa

SEQ ID NO: 1384901 - RNA, 18 nt, Human
ccauguggccaggcuggu

SEQ ID NO: 1384902 - RNA, 22 nt, Human
ccauguggccaggcuggucucg

SEQ ID NO: 1384903 - RNA, 19 nt, Human
cccaccucucuacagagga

SEQ ID NO: 1384904 - RNA, 18 nt, Human
cccacugaguaacagagu

SEQ ID NO: 1384905 - RNA, 21 nt, Human
cccacuuccaaauaacaucac

SEQ ID NO: 1384906 - RNA, 20 nt, Human
cccaggcuacggugcagugg

SEQ ID NO: 1384907 - RNA, 24 nt, Human
cccccaaggcaucuacuguuaccu

SEQ ID NO: 1384908 - RNA, 23 nt, Human
cccggguucaagcaauucuccug

SEQ ID NO: 1384909 - RNA, 23 nt, Human
cccuaguagcugggauuacaggu

SEQ ID NO: 1384910 - RNA, 24 nt, Human
cccuaguagcugggauuacaggug

SEQ ID NO: 1384911 - RNA, 24 nt, Human
ccgccucccagcuucaagugauuc

SEQ ID NO: 1384912 - RNA, 22 nt, Human
ccggaguagcugggacuacagg

SEQ ID NO: 1384913 - RNA, 23 nt, Human
ccuaguagcugggauuacaggug

SEQ ID NO: 1384914 - RNA, 19 nt, Human
ccucauccucccuaguagc

SEQ ID NO: 1384915 - RNA, 24 nt, Human
ccucccagcuucaagugauucucc

SEQ ID NO: 1384916 - RNA, 26 nt, Human
ccucccaucuuggccucccaaagugc

SEQ ID NO: 1384917 - RNA, 24 nt, Human
ccucccggguucaagcaauucucc

SEQ ID NO: 1384918 - RNA, 22 nt, Human
ccucuaagcagacauggagccc

SEQ ID NO: 1384919 - RNA, 24 nt, Human
ccucuuucuugucuauuuucccaa

SEQ ID NO: 1384920 - RNA, 19 nt, Human
ccugaccuugugauccacc

SEQ ID NO: 1384921 - RNA, 21 nt, Human
ccugaccuugugauccaccug

SEQ ID NO: 1384922 - RNA, 20 nt, Human
ccugggcucaagcgauccuc

SEQ ID NO: 1384923 - RNA, 21 nt, Human
ccuggugacagagcgagacuc

SEQ ID NO: 1384924 - RNA, 24 nt, Human
ccuguguugaccaagcuggucucg

SEQ ID NO: 1384925 - RNA, 21 nt, Human
ccuugccaucaguuacccucc

SEQ ID NO: 1384926 - RNA, 24 nt, Human
ccuugccaucaguuacccuccccc

SEQ ID NO: 1384927 - RNA, 23 nt, Human
cgagacuccaucucaaaaaaaaa

SEQ ID NO: 1384928 - RNA, 25 nt, Human
cgagcuccugggcucaagcgauccu

SEQ ID NO: 1384929 - RNA, 19 nt, Human
cgccaccaugcccggcuau

SEQ ID NO: 1384930 - RNA, 24 nt, Human
cgggaggcggagguugcagugagc

SEQ ID NO: 1384931 - RNA, 23 nt, Human
cgggguuuugccauguggccagg

SEQ ID NO: 1384932 - RNA, 20 nt, Human
cuaguagcugggauuacagg

SEQ ID NO: 1384933 - RNA, 18 nt, Human
cucaaaaaaaaaaaaaaa

SEQ ID NO: 1384934 - RNA, 24 nt, Human
cucaagcgauccucccaucuuggc

SEQ ID NO: 1384935 - RNA, 24 nt, Human
cucacugcaaccuccgccucccag

SEQ ID NO: 1384936 - RNA, 24 nt, Human
cucacugcaaccucugccucccgg

SEQ ID NO: 1384937 - RNA, 24 nt, Human
cucagccuccggaguagcugggac

SEQ ID NO: 1384938 - RNA, 24 nt, Human
cucaggguauccacccgccuuggc

SEQ ID NO: 1384939 - RNA, 24 nt, Human
cuccagccuggugacagagcgaga

SEQ ID NO: 1384940 - RNA, 19 nt, Human
cuccaucucaaaaaaaaaa

SEQ ID NO: 1384941 - RNA, 19 nt, Human
cucccagcuucaagugauu

SEQ ID NO: 1384942 - RNA, 24 nt, Human
cuccugaccuugugauccaccugc

SEQ ID NO: 1384943 - RNA, 25 nt, Human
cuccugggcucaagcgauccuccca

SEQ ID NO: 1384944 - RNA, 25 nt, Human
cugaguaacagagucuguuucuucc

SEQ ID NO: 1384945 - RNA, 23 nt, Human
cugauuuuuguauuuuuaguaga

SEQ ID NO: 1384946 - RNA, 19 nt, Human
cugcaaccucugccucccg

SEQ ID NO: 1384947 - RNA, 23 nt, Human
cugcaaccucugccucccggguu

SEQ ID NO: 1384948 - RNA, 24 nt, Human
cugcaaccucugccucccggguuc

SEQ ID NO: 1384949 - RNA, 23 nt, Human
cugccucagccuccggaguagcu

SEQ ID NO: 1384950 - RNA, 25 nt, Human
cugccucauccucccuaguagcugg

SEQ ID NO: 1384951 - RNA, 19 nt, Human
cuggcaaccaagggccuga

SEQ ID NO: 1384952 - RNA, 21 nt, Human
cuggcaaccaagggccugacu

SEQ ID NO: 1384953 - RNA, 22 nt, Human
cuucaagugauucuccugccuc

SEQ ID NO: 1384954 - RNA, 21 nt, Human
cuuccccuuccccuucgccuu

SEQ ID NO: 1384955 - RNA, 22 nt, Human
cuuguagucccagcuacugggg

SEQ ID NO: 1384956 - RNA, 22 nt, Human
cuuuuaugcuugaacugggaug

SEQ ID NO: 1384957 - RNA, 24 nt, Human
gaacucaggguauccacccgccuu

SEQ ID NO: 1384958 - RNA, 20 nt, Human
gaagaagcaagcucucaagg

SEQ ID NO: 1384959 - RNA, 22 nt, Human
gaccuugugauccaccugccuc

SEQ ID NO: 1384960 - RNA, 24 nt, Human
gaccuugugauccaccugccucag

SEQ ID NO: 1384961 - RNA, 23 nt, Human
gagaaucgcuugaacccgggagg

SEQ ID NO: 1384962 - RNA, 22 nt, Human
gagacgggguuuugccaugugg

SEQ ID NO: 1384963 - RNA, 23 nt, Human
gagguugcagugagcugagaucg

SEQ ID NO: 1384964 - RNA, 26 nt, Human
gaguagcugggacuacaggugcaugc

SEQ ID NO: 1384965 - RNA, 18 nt, Human
gauuacagacuucagcca

SEQ ID NO: 1384966 - RNA, 18 nt, Human
gauuacaggugcacgcca

SEQ ID NO: 1384967 - RNA, 22 nt, Human
gauuacaggugcacgccaccau

SEQ ID NO: 1384968 - RNA, 18 nt, Human
gauuacaggugugagcca

SEQ ID NO: 1384969 - RNA, 20 nt, Human
gauuacaggugugagccacc

SEQ ID NO: 1384970 - RNA, 21 nt, Human
gauuacaggugugagccaccg

SEQ ID NO: 1384971 - RNA, 22 nt, Human
gcaaccuccgccucccagcuuc

SEQ ID NO: 1384972 - RNA, 22 nt, Human
gcacagaacaaaaccccccaaa

SEQ ID NO: 1384973 - RNA, 19 nt, Human
gccauguggccaggcuggu

SEQ ID NO: 1384974 - RNA, 20 nt, Human
gccucagccuccggaguagc

SEQ ID NO: 1384975 - RNA, 22 nt, Human
gccuuggccucccaaagugcug

SEQ ID NO: 1384976 - RNA, 18 nt, Human
ggacacagugaggccagc

SEQ ID NO: 1384977 - RNA, 22 nt, Human
ggagcagguggcuugacaacac

SEQ ID NO: 1384978 - RNA, 22 nt, Human
ggagguugcagugagcugagau

SEQ ID NO: 1384979 - RNA, 23 nt, Human
ggagguugcagugagcugagauc

SEQ ID NO: 1384980 - RNA, 24 nt, Human
ggagguugcagugagcugagaucg

SEQ ID NO: 1384981 - RNA, 21 nt, Human
ggcacagagaagaagcaagcu

SEQ ID NO: 1384982 - RNA, 24 nt, Human
ggcuggucucaaacuccugaccuu

SEQ ID NO: 1384983 - RNA, 22 nt, Human
gggaggcugaggcaggagaauc

SEQ ID NO: 1384984 - RNA, 22 nt, Human
gggguuuugccauguggccagg

SEQ ID NO: 1384985 - RNA, 22 nt, Human
ggguuucaccauguuggucagg

SEQ ID NO: 1384986 - RNA, 21 nt, Human
ggguuuugccauguggccagg

SEQ ID NO: 1384987 - RNA, 20 nt, Human
ggucucaaacuccugaccuu

SEQ ID NO: 1384988 - RNA, 20 nt, Human
ggugcaguggcacgaucuug

SEQ ID NO: 1384989 - RNA, 24 nt, Human
ggugcaguggcacgaucuuggcuc

SEQ ID NO: 1384990 - RNA, 23 nt, Human
guagagacgggguuuugccaugu

SEQ ID NO: 1384991 - RNA, 18 nt, Human
guagcugggauuacaggu

SEQ ID NO: 1384992 - RNA, 21 nt, Human
gugaggccagcuuguuucuac

SEQ ID NO: 1384993 - RNA, 18 nt, Human
gugauccaccugccucag

SEQ ID NO: 1384994 - RNA, 24 nt, Human
gugauccaccugccucagccuccc

SEQ ID NO: 1384995 - RNA, 21 nt, Human
gugauucuccugccucagccu

SEQ ID NO: 1384996 - RNA, 20 nt, Human
gugcaguggcacgaucuugg

SEQ ID NO: 1384997 - RNA, 22 nt, Human
gugcaguggcacgaucuuggcu

SEQ ID NO: 1384998 - RNA, 23 nt, Human
gugcaguggcacgaucuuggcuc

SEQ ID NO: 1384999 - RNA, 21 nt, Human
gugcgugccaccaugcucagc

SEQ ID NO: 1385000 - RNA, 18 nt, Human
gugucaggaauucaggca

SEQ ID NO: 1385001 - RNA, 21 nt, Human
guugcagugagcugagaucgc

SEQ ID NO: 1385002 - RNA, 23 nt, Human
uaacaucaccuuaggacuucaac

SEQ ID NO: 1385003 - RNA, 23 nt, Human
uacaggugcaugccaccacaccc

SEQ ID NO: 1385004 - RNA, 22 nt, Human
uacaggugugagccaccgugcc

SEQ ID NO: 1385005 - RNA, 22 nt, Human
uacaggugugagccaccgugcc

SEQ ID NO: 1385006 - RNA, 23 nt, Human
uacaggugugagccaccgugccu

SEQ ID NO: 1385007 - RNA, 24 nt, Human
uacggugcaguggcacgaucuugg

SEQ ID NO: 1385008 - RNA, 22 nt, Human
uagagacaggguuucaccaugu

SEQ ID NO: 1385009 - RNA, 22 nt, Human
uagagacgggguuuugccaugu

SEQ ID NO: 1385010 - RNA, 21 nt, Human
uagcacagaacaaaacccccc

SEQ ID NO: 1385011 - RNA, 22 nt, Human
uagcugggcaugguggcaugug

SEQ ID NO: 1385012 - RNA, 21 nt, Human
uaggauuacagacuucagcca

SEQ ID NO: 1385013 - RNA, 21 nt, Human
uaggauuacagacuucagcca

SEQ ID NO: 1385014 - RNA, 22 nt, Human
uaggauuacagacuucagccau

SEQ ID NO: 1385015 - RNA, 24 nt, Human
uaguagagacaggguuucaccaug

SEQ ID NO: 1385016 - RNA, 26 nt, Human
uaguagagacaggguuucaccauguu

SEQ ID NO: 1385017 - RNA, 24 nt, Human
uaguagagacgggguuuugccaug

SEQ ID NO: 1385018 - RNA, 26 nt, Human
uaguagcugggauuacaggugcacgc

SEQ ID NO: 1385019 - RNA, 26 nt, Human
ucaaagcuaagcuuagcugggacugu

SEQ ID NO: 1385020 - RNA, 18 nt, Human
ucaagugauucuccugcc

SEQ ID NO: 1385021 - RNA, 19 nt, Human
ucacugcaaccuccgccuc

SEQ ID NO: 1385022 - RNA, 23 nt, Human
ucacugcaaccuccgccucccag

SEQ ID NO: 1385023 - RNA, 24 nt, Human
ucacugcaaccuccgccucccagc

SEQ ID NO: 1385024 - RNA, 27 nt, Human
ucacugcaaccuccgccucccagcuuc

SEQ ID NO: 1385025 - RNA, 24 nt, Human
ucacugcaaccucugccucccggg

SEQ ID NO: 1385026 - RNA, 25 nt, Human
ucacugcaaccucugccucccgggu

SEQ ID NO: 1385027 - RNA, 19 nt, Human
ucaggcaggacacagugag

SEQ ID NO: 1385028 - RNA, 23 nt, Human
ucaggcaggacacagugaggcca

SEQ ID NO: 1385029 - RNA, 22 nt, Human
uccagccuggugacagagcgag

SEQ ID NO: 1385030 - RNA, 23 nt, Human
uccaucucaaaaaaaaaaaaaaa

SEQ ID NO: 1385031 - RNA, 19 nt, Human
uccauucugcuggcaacca

SEQ ID NO: 1385032 - RNA, 20 nt, Human
ucccaaaggcccacuuccaa

SEQ ID NO: 1385033 - RNA, 18 nt, Human
ucccaaagugcuaggauu

SEQ ID NO: 1385034 - RNA, 23 nt, Human
ucccaaagugcugggauuacagg

SEQ ID NO: 1385035 - RNA, 24 nt, Human
ucccagcuucaagugauucuccug

SEQ ID NO: 1385036 - RNA, 21 nt, Human
ucccggguucaagcaauucuc

SEQ ID NO: 1385037 - RNA, 24 nt, Human
ucccggguucaagcaauucuccug

SEQ ID NO: 1385038 - RNA, 24 nt, Human
ucccuaguagcugggauuacaggu

SEQ ID NO: 1385039 - RNA, 25 nt, Human
ucccucccaaaggcccacuuccaaa

SEQ ID NO: 1385040 - RNA, 21 nt, Human
ucccuguguugaccaagcugg

SEQ ID NO: 1385041 - RNA, 24 nt, Human
uccggaguagcugggacuacaggu

SEQ ID NO: 1385042 - RNA, 21 nt, Human
uccugggcucaagcgauccuc

SEQ ID NO: 1385043 - RNA, 22 nt, Human
uccugggcucaagcgauccucc

SEQ ID NO: 1385044 - RNA, 23 nt, Human
ucgcaccacugcccuccagccug

SEQ ID NO: 1385045 - RNA, 24 nt, Human
ucgcuugaacccgggaggcggagg

SEQ ID NO: 1385046 - RNA, 20 nt, Human
ucuacucugcaauguuugag

SEQ ID NO: 1385047 - RNA, 27 nt, Human
ucucacucuuaucacccaggcuacggu

SEQ ID NO: 1385048 - RNA, 28 nt, Human
ucucacucuuaucacccaggcuacggug

SEQ ID NO: 1385049 - RNA, 23 nt, Human
ucucacuuuguugcccgagcugg

SEQ ID NO: 1385050 - RNA, 24 nt, Human
ucucacuuuguugcccgagcugga

SEQ ID NO: 1385051 - RNA, 24 nt, Human
ucuccugccucagccuccggagua

SEQ ID NO: 1385052 - RNA, 22 nt, Human
ucucgaacuccugaacucaggg

SEQ ID NO: 1385053 - RNA, 19 nt, Human
ucucgagcuccugggcuca

SEQ ID NO: 1385054 - RNA, 23 nt, Human
ucucgagcuccugggcucaagcg

SEQ ID NO: 1385055 - RNA, 24 nt, Human
ucugccucccggguucaagcaauu

SEQ ID NO: 1385056 - RNA, 21 nt, Human
ucugguucuucuucacucacu

SEQ ID NO: 1385057 - RNA, 22 nt, Human
ucuguuagcacagaacaaaacc

SEQ ID NO: 1385058 - RNA, 21 nt, Human
ucuuggccucccaaagugcua

SEQ ID NO: 1385059 - RNA, 19 nt, Human
ucuuguucuuccccuuccc

SEQ ID NO: 1385060 - RNA, 24 nt, Human
ugaagagucuaagaucaaggugcu

SEQ ID NO: 1385061 - RNA, 24 nt, Human
ugaccaagcuggucucgagcuccu

SEQ ID NO: 1385062 - RNA, 20 nt, Human
ugacucaaagcuaagcuuag

SEQ ID NO: 1385063 - RNA, 18 nt, Human
ugagacagagucucacuc

SEQ ID NO: 1385064 - RNA, 22 nt, Human
ugagcugagaucgcaccacugc

SEQ ID NO: 1385065 - RNA, 20 nt, Human
ugaggcaggagaaucgcuug

SEQ ID NO: 1385066 - RNA, 24 nt, Human
ugaggcaggagaaucgcuugaacc

SEQ ID NO: 1385067 - RNA, 25 nt, Human
ugaggcaggagaaucgcuugaaccc

SEQ ID NO: 1385068 - RNA, 22 nt, Human
ugaggccagcuuguuucuacuc

SEQ ID NO: 1385069 - RNA, 20 nt, Human
ugcaauggcaugaugucggc

SEQ ID NO: 1385070 - RNA, 24 nt, Human
ugccucagccuccggaguagcugg

SEQ ID NO: 1385071 - RNA, 18 nt, Human
ugccucaggcuccaagag

SEQ ID NO: 1385072 - RNA, 19 nt, Human
ugccucaggcuccaagagc

SEQ ID NO: 1385073 - RNA, 22 nt, Human
ugccucaggcuccaagagcuag

SEQ ID NO: 1385074 - RNA, 21 nt, Human
ugcgaucaggugcgugccacc

SEQ ID NO: 1385075 - RNA, 24 nt, Human
ugcugggauuacaggugugagcca

SEQ ID NO: 1385076 - RNA, 22 nt, Human
ugcuuguagucccagcuacugg

SEQ ID NO: 1385077 - RNA, 23 nt, Human
ugcuuguagucccagcuacuggg

SEQ ID NO: 1385078 - RNA, 20 nt, Human
uggcaugaugucggcucacu

SEQ ID NO: 1385079 - RNA, 20 nt, Human
uggcaugugcuuguaguccc

SEQ ID NO: 1385080 - RNA, 24 nt, Human
uggcaugugcuuguagucccagcu

SEQ ID NO: 1385081 - RNA, 24 nt, Human
uggccaggcuggucucgaacuccu

SEQ ID NO: 1385082 - RNA, 21 nt, Human
ugggacuacaggugcaugcca

SEQ ID NO: 1385083 - RNA, 22 nt, Human
ugggacuacaggugcaugccac

SEQ ID NO: 1385084 - RNA, 24 nt, Human
ugggacuacaggugcaugccacca

SEQ ID NO: 1385085 - RNA, 22 nt, Human
ugggauuacaggugcacgccac

SEQ ID NO: 1385086 - RNA, 24 nt, Human
ugggauuacaggugcacgccacca

SEQ ID NO: 1385087 - RNA, 25 nt, Human
ugggauuacaggugcacgccaccau

SEQ ID NO: 1385088 - RNA, 18 nt, Human
ugggauuacaggugugag

SEQ ID NO: 1385089 - RNA, 21 nt, Human
ugggauuacaggugugagcca

SEQ ID NO: 1385090 - RNA, 22 nt, Human
ugggauuacaggugugagccac

SEQ ID NO: 1385091 - RNA, 23 nt, Human
ugggauuacaggugugagccacc

SEQ ID NO: 1385092 - RNA, 23 nt, Human
ugggauuacaggugugagccacc

SEQ ID NO: 1385093 - RNA, 24 nt, Human
ugggauuacaggugugagccaccg

SEQ ID NO: 1385094 - RNA, 20 nt, Human
ugggcaugguggcaugugcu

SEQ ID NO: 1385095 - RNA, 24 nt, Human
uggucaggcuggucucaaacuccu

SEQ ID NO: 1385096 - RNA, 24 nt, Human
ugguggcaugugcuuguaguccca

SEQ ID NO: 1385097 - RNA, 21 nt, Human
uguauuuuuaguagagacggg

SEQ ID NO: 1385098 - RNA, 19 nt, Human
ugucaggaauucaggcagg

SEQ ID NO: 1385099 - RNA, 19 nt, Human
ugucuauuuucccagaagu

SEQ ID NO: 1385100 - RNA, 22 nt, Human
ugucuauuuucccagaaguucu

SEQ ID NO: 1385101 - RNA, 25 nt, Human
ugugagccaccgugccuggccucau

SEQ ID NO: 1385102 - RNA, 24 nt, Human
ugugauccaccugccucagccucc

SEQ ID NO: 1385103 - RNA, 18 nt, Human
ugugucaggaauucaggc

SEQ ID NO: 1385104 - RNA, 21 nt, Human
uuagagcucugaccugagcac

SEQ ID NO: 1385105 - RNA, 19 nt, Human
uuagcugggcaugguggca

SEQ ID NO: 1385106 - RNA, 24 nt, Human
uuagcugggcaugguggcaugugc

SEQ ID NO: 1385107 - RNA, 24 nt, Human
uuaguagagacaggguuucaccau

SEQ ID NO: 1385108 - RNA, 18 nt, Human
uuaguagagacgggguuu

SEQ ID NO: 1385109 - RNA, 22 nt, Human
uuaguagagacgggguuuugcc

SEQ ID NO: 1385110 - RNA, 24 nt, Human
uuaguagagacgggguuuugccau

SEQ ID NO: 1385111 - RNA, 21 nt, Human
uucaagcaauucuccugccuc

SEQ ID NO: 1385112 - RNA, 23 nt, Human
uucaagcaauucuccugccucau

SEQ ID NO: 1385113 - RNA, 21 nt, Human
uucaagugauucuccugccuc

SEQ ID NO: 1385114 - RNA, 23 nt, Human
uucaagugauucuccugccucag

SEQ ID NO: 1385115 - RNA, 24 nt, Human
uucaagugauucuccugccucagc

SEQ ID NO: 1385116 - RNA, 19 nt, Human
uucagagaggguacaagga

SEQ ID NO: 1385117 - RNA, 19 nt, Human
uuccucaggucugcagggu

SEQ ID NO: 1385118 - RNA, 22 nt, Human
uuccucaggucugcagggugaa

SEQ ID NO: 1385119 - RNA, 24 nt, Human
uugaacccgggaggcggagguugc

SEQ ID NO: 1385120 - RNA, 23 nt, Human
uugagacagagucucacucuuau

SEQ ID NO: 1385121 - RNA, 18 nt, Human
uugcagugagcugagauc

SEQ ID NO: 1385122 - RNA, 19 nt, Human
uugcagugagcugagaucg

SEQ ID NO: 1385123 - RNA, 22 nt, Human
uugcagugagcugagaucgcac

SEQ ID NO: 1385124 - RNA, 24 nt, Human
uugccaucaguuacccucccccaa

SEQ ID NO: 1385125 - RNA, 24 nt, Human
uugccauguggccaggcuggucuc

SEQ ID NO: 1385126 - RNA, 22 nt, Human
uugccuguacuuuuaugucugg

SEQ ID NO: 1385127 - RNA, 18 nt, Human
uuggccucccaaagugcu

SEQ ID NO: 1385128 - RNA, 23 nt, Human
uuguauuuuuaguagagacgggg

SEQ ID NO: 1385129 - RNA, 24 nt, Human
uuucaccauguuggucaggcuggu

SEQ ID NO: 1385130 - RNA, 22 nt, Human
uuugagaauuucaaauggaggc

SEQ ID NO: 1385131 - RNA, 21 nt, Human
uuuuguauuuuuaguagagac

SEQ ID NO: 1385132 - RNA, 24 nt, Human
uuuuuaguagagacaggguuucac

SEQ ID NO: 1385133 - RNA, 21 nt, Human
uuuuuaguagagacgggguuu

SEQ ID NO: 1385134 - RNA, 24 nt, Human
uuuuuaguagagacgggguuuugc

SEQ ID NO: 1385135 - RNA, 20 nt, Human
uuuuuguauuuuuaguagag

SEQ ID NO: 1385136 - RNA, 20 nt, Human
uuuuuguauuuuuaguagag

SEQ ID NO: 1385137 - RNA, 26 nt, Human
uuuuuuuuuuuugagacagagucuca

SEQ ID NO: 1385138 - RNA, 18 nt, Human
uuuuuuuuuuuuuuuuug

SEQ ID NO: 1385139 - RNA, 19 nt, Human
aggcaaaacuguucccuga

SEQ ID NO: 1385140 - RNA, 22 nt, Human
auccacuguagccucuugucau

SEQ ID NO: 1385141 - RNA, 21 nt, Human
caagauguacagcaagaccug

SEQ ID NO: 1385142 - RNA, 25 nt, Human
cauucugaacucucaugugugucuu

SEQ ID NO: 1385143 - RNA, 20 nt, Human
cccugaagaccucuccacaa

SEQ ID NO: 1385144 - RNA, 29 nt, Human
cugauggugugaugaugugcaucccuucc

SEQ ID NO: 1385145 - RNA, 23 nt, Human
gaucaccucaggccagcuuauga

SEQ ID NO: 1385146 - RNA, 22 nt, Human
gucacagaguuuccauccacug

SEQ ID NO: 1385147 - RNA, 19 nt, Human
gugaugaugugcaucccuu

SEQ ID NO: 1385148 - RNA, 21 nt, Human
gugcaucccuuccuugaugcc

SEQ ID NO: 1385149 - RNA, 18 nt, Human
ugagaacuucaagaugua

SEQ ID NO: 1385150 - RNA, 19 nt, Human
ugcacacugagggugucuu

SEQ ID NO: 1385151 - RNA, 23 nt, Human
uggugugaugaugugcaucccuu

SEQ ID NO: 1385152 - RNA, 23 nt, Human
uuaaauuuggaaaguuccugucc

SEQ ID NO: 1385153 - RNA, 19 nt, Human
uucccugaagaccucucca

SEQ ID NO: 1385154 - RNA, 24 nt, Human
uuccugaaauucacagaguuucuc

SEQ ID NO: 1385155 - RNA, 24 nt, Human
uugaugccaagaucaccucaggcc

SEQ ID NO: 1385156 - RNA, 23 nt, Human
aaacaaauguuucucaacgagcu

SEQ ID NO: 1385157 - RNA, 23 nt, Human
aaaggugcaacgagaaccaaguc

SEQ ID NO: 1385158 - RNA, 18 nt, Human
aaccagucaauccguuaa

SEQ ID NO: 1385159 - RNA, 18 nt, Human
acaaagcaaaauacaugg

SEQ ID NO: 1385160 - RNA, 25 nt, Human
acaaagcaaaauacauggugggacu

SEQ ID NO: 1385161 - RNA, 20 nt, Human
agcgaaggcucucacucugc

SEQ ID NO: 1385162 - RNA, 19 nt, Human
agcggaagcgcggggcgcc

SEQ ID NO: 1385163 - RNA, 23 nt, Human
aggcacgaccacaguagccgcac

SEQ ID NO: 1385164 - RNA, 20 nt, Human
agggugguggccccggcaaa

SEQ ID NO: 1385165 - RNA, 19 nt, Human
aguuauuggcuugcacuca

SEQ ID NO: 1385166 - RNA, 22 nt, Human
auggaagacauggaaaugggau

SEQ ID NO: 1385167 - RNA, 23 nt, Human
auuuucuuccuuuuccagacucu

SEQ ID NO: 1385168 - RNA, 23 nt, Human
caauaucucuuaacaucuuacuu

SEQ ID NO: 1385169 - RNA, 23 nt, Human
cacaguagccgcacuugaaaggc

SEQ ID NO: 1385170 - RNA, 20 nt, Human
caccaccgcacuugacgggc

SEQ ID NO: 1385171 - RNA, 19 nt, Human
caccggcagcugcgacacc

SEQ ID NO: 1385172 - RNA, 26 nt, Human
cagcggaagcgcggggcgccgcgacc

SEQ ID NO: 1385173 - RNA, 20 nt, Human
cagggccgagagaccagcca

SEQ ID NO: 1385174 - RNA, 22 nt, Human
cagguaauaguccagcuccucu

SEQ ID NO: 1385175 - RNA, 20 nt, Human
caguggguccccaugaaaca

SEQ ID NO: 1385176 - RNA, 18 nt, Human
ccccugagcagcgcggga

SEQ ID NO: 1385177 - RNA, 21 nt, Human
ccccugagcagcgcgggagga

SEQ ID NO: 1385178 - RNA, 23 nt, Human
cccgccgccgccgccaccaccac

SEQ ID NO: 1385179 - RNA, 19 nt, Human
cccggcaaaggcacgacca

SEQ ID NO: 1385180 - RNA, 20 nt, Human
cccggcaaaggcacgaccac

SEQ ID NO: 1385181 - RNA, 26 nt, Human
cccggggccggagguggcgccgaggc

SEQ ID NO: 1385182 - RNA, 23 nt, Human
ccgcccggaaaccucccgaccug

SEQ ID NO: 1385183 - RNA, 28 nt, Human
ccgccgccaccaccaccgcacuugacgg

SEQ ID NO: 1385184 - RNA, 21 nt, Human
ccugcaucaagaccgggcugu

SEQ ID NO: 1385185 - RNA, 19 nt, Human
cgaacaccggcagcugcga

SEQ ID NO: 1385186 - RNA, 22 nt, Human
cgcgaacaccggcagcugcgac

SEQ ID NO: 1385187 - RNA, 21 nt, Human
cggaaaccucccgaccugcaa

SEQ ID NO: 1385188 - RNA, 27 nt, Human
cggcucggcggcgacggcagcggcggg

SEQ ID NO: 1385189 - RNA, 22 nt, Human
cggugggcagaagaacccauac

SEQ ID NO: 1385190 - RNA, 18 nt, Human
cuccccgccgccgccgcc

SEQ ID NO: 1385191 - RNA, 24 nt, Human
cuccccgccgccgccgccaccacc

SEQ ID NO: 1385192 - RNA, 18 nt, Human
cugcgacaccggcagggc

SEQ ID NO: 1385193 - RNA, 18 nt, Human
cuggcagcuucccggcug

SEQ ID NO: 1385194 - RNA, 22 nt, Human
cuggcuccuugguuccacgcuc

SEQ ID NO: 1385195 - RNA, 20 nt, Human
cuggggcagccagugucagg

SEQ ID NO: 1385196 - RNA, 26 nt, Human
gaagcuccucucacaccucucgcacu

SEQ ID NO: 1385197 - RNA, 24 nt, Human
gacaccggcagggccgagagacca

SEQ ID NO: 1385198 - RNA, 20 nt, Human
gaccacaguagccgcacuug

SEQ ID NO: 1385199 - RNA, 24 nt, Human
gacuggaaauguuaaccaucccag

SEQ ID NO: 1385200 - RNA, 21 nt, Human
gcaaaggcacgaccacaguag

SEQ ID NO: 1385201 - RNA, 19 nt, Human
gcacuugaaaggccgguca

SEQ ID NO: 1385202 - RNA, 19 nt, Human
gcccgcggagggcgcgaga

SEQ ID NO: 1385203 - RNA, 18 nt, Human
gcccggaaaccucccgac

SEQ ID NO: 1385204 - RNA, 22 nt, Human
gccugcgugaagcuccucucac

SEQ ID NO: 1385205 - RNA, 25 nt, Human
gcgaacaccggcagcugcgacaccg

SEQ ID NO: 1385206 - RNA, 22 nt, Human
gcgacggcagcggcggcuagag

SEQ ID NO: 1385207 - RNA, 19 nt, Human
ggcggcgacggcagcggcg

SEQ ID NO: 1385208 - RNA, 19 nt, Human
gggggcagcggcucggcgg

SEQ ID NO: 1385209 - RNA, 21 nt, Human
ggucugacuuccaugccagga

SEQ ID NO: 1385210 - RNA, 21 nt, Human
ggugucggcucagcugggugg

SEQ ID NO: 1385211 - RNA, 20 nt, Human
gugugugugugugugugugu

SEQ ID NO: 1385212 - RNA, 21 nt, Human
gugugugugugugugugugug

SEQ ID NO: 1385213 - RNA, 20 nt, Human
uaaaaagugcaugagcagug

SEQ ID NO: 1385214 - RNA, 23 nt, Human
uagaaacaaagcaaaauacaugg

SEQ ID NO: 1385215 - RNA, 20 nt, Human
ucaggccaggccaaacugaa

SEQ ID NO: 1385216 - RNA, 23 nt, Human
ucaggccaggccaaacugacaca

SEQ ID NO: 1385217 - RNA, 21 nt, Human
ucccugugcauucuuagucac

SEQ ID NO: 1385218 - RNA, 26 nt, Human
uccgcuggugucggcucagcugggug

SEQ ID NO: 1385219 - RNA, 24 nt, Human
uccgugguccccgcuggggcagcc

SEQ ID NO: 1385220 - RNA, 20 nt, Human
uccuagagauugugccgccc

SEQ ID NO: 1385221 - RNA, 22 nt, Human
uccucugcgcugcagcggaagc

SEQ ID NO: 1385222 - RNA, 19 nt, Human
uccuuggggggcagcggcu

SEQ ID NO: 1385223 - RNA, 22 nt, Human
uccuuggggggcagcggcucgg

SEQ ID NO: 1385224 - RNA, 25 nt, Human
ucggugagcgugcgggugcgcgaga

SEQ ID NO: 1385225 - RNA, 25 nt, Human
ucugcgcugcagcggaagcgcgggg

SEQ ID NO: 1385226 - RNA, 22 nt, Human
ucuuugguuuugcuuaaguguc

SEQ ID NO: 1385227 - RNA, 19 nt, Human
ugacacagcagaaugaagg

SEQ ID NO: 1385228 - RNA, 19 nt, Human
ugacuuccaugccaggauc

SEQ ID NO: 1385229 - RNA, 20 nt, Human
ugagcgugcgggugcgcgag

SEQ ID NO: 1385230 - RNA, 21 nt, Human
ugagcgugcgggugcgcgaga

SEQ ID NO: 1385231 - RNA, 25 nt, Human
ugagugugugugugugugugugugg

SEQ ID NO: 1385232 - RNA, 19 nt, Human
ugccaggaucaauaucucu

SEQ ID NO: 1385233 - RNA, 19 nt, Human
ugccccugagcagcgcggg

SEQ ID NO: 1385234 - RNA, 18 nt, Human
uggccgcugccgcguccu

SEQ ID NO: 1385235 - RNA, 20 nt, Human
uggcuccuugguuccacgcu

SEQ ID NO: 1385236 - RNA, 24 nt, Human
uggcuugcacucauugggcauccg

SEQ ID NO: 1385237 - RNA, 18 nt, Human
ugggaugcgucuggggcu

SEQ ID NO: 1385238 - RNA, 21 nt, Human
ugguuuugcuuaaguguccgu

SEQ ID NO: 1385239 - RNA, 23 nt, Human
uguacaguggguccccaugaaac

SEQ ID NO: 1385240 - RNA, 18 nt, Human
ugugugugugugugugug

SEQ ID NO: 1385241 - RNA, 18 nt, Human
ugugugugugugugugug

SEQ ID NO: 1385242 - RNA, 18 nt, Human
ugugugugugugugugug

SEQ ID NO: 1385243 - RNA, 18 nt, Human
ugugugugugugugugug

SEQ ID NO: 1385244 - RNA, 18 nt, Human
ugugugugugugugugug

SEQ ID NO: 1385245 - RNA, 18 nt, Human
ugugugugugugugugug

SEQ ID NO: 1385246 - RNA, 18 nt, Human
ugugugugugugugugug

SEQ ID NO: 1385247 - RNA, 18 nt, Human
ugugugugugugugugug

SEQ ID NO: 1385248 - RNA, 21 nt, Human
ugugugugugugugugugugu

SEQ ID NO: 1385249 - RNA, 21 nt, Human
ugugugugugugugugugugu

SEQ ID NO: 1385250 - RNA, 21 nt, Human
ugugugugugugugugugugu

SEQ ID NO: 1385251 - RNA, 21 nt, Human
ugugugugugugugugugugu

SEQ ID NO: 1385252 - RNA, 21 nt, Human
ugugugugugugugugugugu

SEQ ID NO: 1385253 - RNA, 21 nt, Human
ugugugugugugugugugugu

SEQ ID NO: 1385254 - RNA, 21 nt, Human
ugugugugugugugugugugu

SEQ ID NO: 1385255 - RNA, 21 nt, Human
ugugugugugugugugugugu

SEQ ID NO: 1385256 - RNA, 21 nt, Human
ugugugugugugugugugugu

SEQ ID NO: 1385257 - RNA, 21 nt, Human
ugugugugugugugugugugu

SEQ ID NO: 1385258 - RNA, 21 nt, Human
ugugugugugugugugugugu

SEQ ID NO: 1385259 - RNA, 21 nt, Human
ugugugugugugugugugugu

SEQ ID NO: 1385260 - RNA, 21 nt, Human
ugugugugugugugugugugu

SEQ ID NO: 1385261 - RNA, 21 nt, Human
ugugugugugugugugugugu

SEQ ID NO: 1385262 - RNA, 22 nt, Human
ugugugugugugugugugugug

SEQ ID NO: 1385263 - RNA, 22 nt, Human
ugugugugugugugugugugug

SEQ ID NO: 1385264 - RNA, 22 nt, Human
ugugugugugugugugugugug

SEQ ID NO: 1385265 - RNA, 22 nt, Human
ugugugugugugugugugugug

SEQ ID NO: 1385266 - RNA, 22 nt, Human
ugugugugugugugugugugug

SEQ ID NO: 1385267 - RNA, 22 nt, Human
ugugugugugugugugugugug

SEQ ID NO: 1385268 - RNA, 25 nt, Human
uguuacuaaaaaaaggugcaacgag

SEQ ID NO: 1385269 - RNA, 19 nt, Human
uguuucucaacgagcugcu

SEQ ID NO: 1385270 - RNA, 21 nt, Human
uuacugcuuuugguuuucugg

SEQ ID NO: 1385271 - RNA, 20 nt, Human
uuccagacucuccugcauca

SEQ ID NO: 1385272 - RNA, 24 nt, Human
uuccgugguccccgcuggggcagc

SEQ ID NO: 1385273 - RNA, 19 nt, Human
uugggcauccgcugguguc

SEQ ID NO: 1385274 - RNA, 20 nt, Human
uugguuuucugggacugauu

SEQ ID NO: 1385275 - RNA, 23 nt, Human
uuuccuggucugacuuccaugcc

SEQ ID NO: 1385276 - RNA, 18 nt, Human
uuugaaacugaaaccauu

SEQ ID NO: 1385277 - RNA, 22 nt, Human
aaaaaaaaaacacaaagauuug

SEQ ID NO: 1385278 - RNA, 23 nt, Human
aaaaaaaacaaaaaaaaaaacac

SEQ ID NO: 1385279 - RNA, 23 nt, Human
aaaacaaaaaaaaaaacacaaag

SEQ ID NO: 1385280 - RNA, 24 nt, Human
aaaacaaaaaaaaaaacacaaaga

SEQ ID NO: 1385281 - RNA, 21 nt, Human
aaacacaaagauuugcgagcu

SEQ ID NO: 1385282 - RNA, 24 nt, Human
aaagauuugcgagcucagagacaa

SEQ ID NO: 1385283 - RNA, 20 nt, Human
aaccccugcccguugcucuc

SEQ ID NO: 1385284 - RNA, 22 nt, Human
aaccugucccuucagcugggua

SEQ ID NO: 1385285 - RNA, 18 nt, Human
aacgugcugcccccaugg

SEQ ID NO: 1385286 - RNA, 21 nt, Human
aagcugggguccuuccccauu

SEQ ID NO: 1385287 - RNA, 24 nt, Human
accacauucagucauucuguggga

SEQ ID NO: 1385288 - RNA, 25 nt, Human
acucugucaccaaggcuggaagcga

SEQ ID NO: 1385289 - RNA, 19 nt, Human
agucauucuguggaguuuu

SEQ ID NO: 1385290 - RNA, 21 nt, Human
agugaugcuguggucuccagc

SEQ ID NO: 1385291 - RNA, 25 nt, Human
auagcccugcaauagugucaaagau

SEQ ID NO: 1385292 - RNA, 22 nt, Human
cacaaagauuugcgagcucaga

SEQ ID NO: 1385293 - RNA, 18 nt, Human
cacccucucuucccuccc

SEQ ID NO: 1385294 - RNA, 20 nt, Human
cacccucucuucccucccaa

SEQ ID NO: 1385295 - RNA, 20 nt, Human
cagcagcaauaggagaccaa

SEQ ID NO: 1385296 - RNA, 18 nt, Human
cagcuggguaaucucccu

SEQ ID NO: 1385297 - RNA, 23 nt, Human
cauagcccugcaauagugucaaa

SEQ ID NO: 1385298 - RNA, 24 nt, Human
caucauccgucaaccccugcccgu

SEQ ID NO: 1385299 - RNA, 24 nt, Human
ccacccucucuucccucccaaccu

SEQ ID NO: 1385300 - RNA, 24 nt, Human
ccagcuggccuccugaauggcuaa

SEQ ID NO: 1385301 - RNA, 22 nt, Human
ccauggcccaagccacccucuc

SEQ ID NO: 1385302 - RNA, 24 nt, Human
ccccauggcccaagccacccucuc

SEQ ID NO: 1385303 - RNA, 26 nt, Human
cccucucuucccucccaaccuguccc

SEQ ID NO: 1385304 - RNA, 25 nt, Human
ccgucucaaaaaaaaaaaaacaaaa

SEQ ID NO: 1385305 - RNA, 19 nt, Human
ccuccaugggaguagacuc

SEQ ID NO: 1385306 - RNA, 24 nt, Human
ccucuugugaaacaacaggguugg

SEQ ID NO: 1385307 - RNA, 24 nt, Human
ccuuccccauugccagcucugcag

SEQ ID NO: 1385308 - RNA, 23 nt, Human
cgacacuccgucucaaaaaaaaa

SEQ ID NO: 1385309 - RNA, 21 nt, Human
cgcacaagcuuguccaacccu

SEQ ID NO: 1385310 - RNA, 22 nt, Human
cgccugcaggcugaauguggcc

SEQ ID NO: 1385311 - RNA, 19 nt, Human
cuaccugauucucccuggc

SEQ ID NO: 1385312 - RNA, 18 nt, Human
cucaaaaaaaaaaaaaca

SEQ ID NO: 1385313 - RNA, 25 nt, Human
cucaaaaaaaaaaaaacaaaaaaaa

SEQ ID NO: 1385314 - RNA, 21 nt, Human
cucagcuuucuggccuugacc

SEQ ID NO: 1385315 - RNA, 18 nt, Human
cuccgccugcaggcugaa

SEQ ID NO: 1385316 - RNA, 23 nt, Human
cuccgucucaaaaaaaaaaaaac

SEQ ID NO: 1385317 - RNA, 22 nt, Human
cugaguuuaucugcgccacuug

SEQ ID NO: 1385318 - RNA, 22 nt, Human
cuugcuaaccucagagaauaaa

SEQ ID NO: 1385319 - RNA, 23 nt, Human
gaaacaacaggguagaacuuaag

SEQ ID NO: 1385320 - RNA, 21 nt, Human
gaaccacauucagucauucug

SEQ ID NO: 1385321 - RNA, 18 nt, Human
gaagcgacacuccgucuc

SEQ ID NO: 1385322 - RNA, 23 nt, Human
gcacaagcuuguccaacccuccg

SEQ ID NO: 1385323 - RNA, 21 nt, Human
gcccaacauaaauuuguaaac

SEQ ID NO: 1385324 - RNA, 19 nt, Human
gcuccugggguggcagcuc

SEQ ID NO: 1385325 - RNA, 20 nt, Human
gcucugcagcacugcccucc

SEQ ID NO: 1385326 - RNA, 21 nt, Human
gcucugcagcacugcccuccu

SEQ ID NO: 1385327 - RNA, 20 nt, Human
ggcuggaagcgacacuccgu

SEQ ID NO: 1385328 - RNA, 22 nt, Human
guggggccagagcacgccuucc

SEQ ID NO: 1385329 - RNA, 22 nt, Human
uccgucaaccccugcccguugc

SEQ ID NO: 1385330 - RNA, 23 nt, Human
ucucaaaaaaaaaaaaacaaaaa

SEQ ID NO: 1385331 - RNA, 26 nt, Human
ucucaaaaaaaaaaaaacaaaaaaaa

SEQ ID NO: 1385332 - RNA, 22 nt, Human
ucucacucugucaccaaggcug

SEQ ID NO: 1385333 - RNA, 24 nt, Human
ucucacucugucaccaaggcugga

SEQ ID NO: 1385334 - RNA, 18 nt, Human
ucugacagucugaaucug

SEQ ID NO: 1385335 - RNA, 24 nt, Human
ucugacagucugaaucugucuugu

SEQ ID NO: 1385336 - RNA, 24 nt, Human
ucugaguuuaucugcgccacuugu

SEQ ID NO: 1385337 - RNA, 21 nt, Human
ucugucaccaaggcuggaagc

SEQ ID NO: 1385338 - RNA, 18 nt, Human
ugaauguggcccaacaua

SEQ ID NO: 1385339 - RNA, 21 nt, Human
ugccuuggcaaugacagacaa

SEQ ID NO: 1385340 - RNA, 23 nt, Human
uggauggaaaagaaaggaaccug

SEQ ID NO: 1385341 - RNA, 25 nt, Human
uggcaaugacagacaagcugggguc

SEQ ID NO: 1385342 - RNA, 22 nt, Human
ugggauggagucucacucuguc

SEQ ID NO: 1385343 - RNA, 25 nt, Human
uggggugccuauuuugucuucccag

SEQ ID NO: 1385344 - RNA, 25 nt, Human
uguuaugaaguugcugaguuugggg

SEQ ID NO: 1385345 - RNA, 18 nt, Human
uguuuuugggauggaguc

SEQ ID NO: 1385346 - RNA, 20 nt, Human
uugcugaguuuggggugccu

SEQ ID NO: 1385347 - RNA, 21 nt, Human
uugggauggagucucacucug

SEQ ID NO: 1385348 - RNA, 18 nt, Human
uuguuguuguuguuuuug

SEQ ID NO: 1385349 - RNA, 25 nt, Human
uuuauucacauuuauaauaagaacu

SEQ ID NO: 1385350 - RNA, 22 nt, Human
uuuguaaacuuacuuaaaacau

SEQ ID NO: 1385351 - RNA, 19 nt, Human
aaaacaaacaaacaacaac

SEQ ID NO: 1385352 - RNA, 18 nt, Human
aaacaaacaaacaacaac

SEQ ID NO: 1385353 - RNA, 21 nt, Human
aaacaaauaagcaucccuucc

SEQ ID NO: 1385354 - RNA, 24 nt, Human
aaacaacaacaaaaaacugggcaa

SEQ ID NO: 1385355 - RNA, 19 nt, Human
aaaggccaggaccuuggag

SEQ ID NO: 1385356 - RNA, 19 nt, Human
aacaaaaaacugggcaacc

SEQ ID NO: 1385357 - RNA, 22 nt, Human
aacaaacaaacaacaacaaaaa

SEQ ID NO: 1385358 - RNA, 23 nt, Human
aacaaacaaacaacaacaaaaaa

SEQ ID NO: 1385359 - RNA, 21 nt, Human
aacagagggaaacuccgucuc

SEQ ID NO: 1385360 - RNA, 24 nt, Human
aacagagggaaacuccgucucaaa

SEQ ID NO: 1385361 - RNA, 22 nt, Human
aauaaaauccggagaggcgaag

SEQ ID NO: 1385362 - RNA, 19 nt, Human
acaaauaagcaucccuucc

SEQ ID NO: 1385363 - RNA, 25 nt, Human
acagagggaaacuccgucucaaaaa

SEQ ID NO: 1385364 - RNA, 21 nt, Human
acauuauugucaagagagucc

SEQ ID NO: 1385365 - RNA, 25 nt, Human
acuuugaacucuuuuccugaagccc

SEQ ID NO: 1385366 - RNA, 24 nt, Human
agccugggcaacagagggaaacuc

SEQ ID NO: 1385367 - RNA, 22 nt, Human
agcuccaaauucaccaucuccc

SEQ ID NO: 1385368 - RNA, 18 nt, Human
auuuuucuguuucaaagu

SEQ ID NO: 1385369 - RNA, 21 nt, Human
caacaaaaaacugggcaacca

SEQ ID NO: 1385370 - RNA, 23 nt, Human
caacaaaaaacugggcaaccacc

SEQ ID NO: 1385371 - RNA, 19 nt, Human
caacaacaaaaaacugggc

SEQ ID NO: 1385372 - RNA, 22 nt, Human
cacauuauugucaagagagucc

SEQ ID NO: 1385373 - RNA, 22 nt, Human
cagccugggcaacagagggaaa

SEQ ID NO: 1385374 - RNA, 19 nt, Human
caggaaaggccaggaccuu

SEQ ID NO: 1385375 - RNA, 22 nt, Human
cccuuugcuguuggcuuggaca

SEQ ID NO: 1385376 - RNA, 20 nt, Human
cugcauauuauaucuucccu

SEQ ID NO: 1385377 - RNA, 24 nt, Human
cuuacuuugaacucuuuuccugaa

SEQ ID NO: 1385378 - RNA, 22 nt, Human
cuugcuggcauuuugcagcugc

SEQ ID NO: 1385379 - RNA, 23 nt, Human
cuuucuaagcagccucucuugag

SEQ ID NO: 1385380 - RNA, 24 nt, Human
gacccagacuuucuaagcagccuc

SEQ ID NO: 1385381 - RNA, 20 nt, Human
gauauguuauccggaaauau

SEQ ID NO: 1385382 - RNA, 19 nt, Human
gcugaagauugagucagug

SEQ ID NO: 1385383 - RNA, 24 nt, Human
gcuguuggcuuggacaauaugugu

SEQ ID NO: 1385384 - RNA, 22 nt, Human
ggaaagaacucuuagaugugaa

SEQ ID NO: 1385385 - RNA, 23 nt, Human
ggucaccuuugaugucagaaaca

SEQ ID NO: 1385386 - RNA, 19 nt, Human
gucucagugcacccaaacc

SEQ ID NO: 1385387 - RNA, 23 nt, Human
gucucagugcacccaaaccccag

SEQ ID NO: 1385388 - RNA, 21 nt, Human
gugccagcacuauuuuaggua

SEQ ID NO: 1385389 - RNA, 24 nt, Human
uaaaauaaaauuuccacuuagaua

SEQ ID NO: 1385390 - RNA, 22 nt, Human
uaagcugcuuaugauuuuagcc

SEQ ID NO: 1385391 - RNA, 20 nt, Human
uacagaucuaauagauugga

SEQ ID NO: 1385392 - RNA, 26 nt, Human
uacauagaccaccaucaacuuauaau

SEQ ID NO: 1385393 - RNA, 21 nt, Human
uaccaguguuauaacagugaa

SEQ ID NO: 1385394 - RNA, 20 nt, Human
uaccuuugcagugugagucu

SEQ ID NO: 1385395 - RNA, 19 nt, Human
uacuuuacucacuugauua

SEQ ID NO: 1385396 - RNA, 27 nt, Human
uacuuuacucacuugauuaccgacuuc

SEQ ID NO: 1385397 - RNA, 22 nt, Human
uagcuaacaaaauccagcucca

SEQ ID NO: 1385398 - RNA, 25 nt, Human
ucaaaaacaaacaaacaacaacaaa

SEQ ID NO: 1385399 - RNA, 18 nt, Human
ucagugcacccaaacccc

SEQ ID NO: 1385400 - RNA, 20 nt, Human
uccaaauucaccaucucccu

SEQ ID NO: 1385401 - RNA, 18 nt, Human
uccaucauauugagauuu

SEQ ID NO: 1385402 - RNA, 19 nt, Human
ugaaaagcagcaacuugaa

SEQ ID NO: 1385403 - RNA, 20 nt, Human
ugaaaagcagcaacuugaaa

SEQ ID NO: 1385404 - RNA, 18 nt, Human
ugaaacaaauaagcaucc

SEQ ID NO: 1385405 - RNA, 19 nt, Human
ugaaacaaauaagcauccc

SEQ ID NO: 1385406 - RNA, 22 nt, Human
ugaaaugaaacaaauaagcauc

SEQ ID NO: 1385407 - RNA, 23 nt, Human
ugaauaaaguauuauuucugaug

SEQ ID NO: 1385408 - RNA, 24 nt, Human
ugaauaaaguauuauuucugaugg

SEQ ID NO: 1385409 - RNA, 20 nt, Human
ugaggaaacugaggcuccca

SEQ ID NO: 1385410 - RNA, 24 nt, Human
ugaggaaacugaggcucccaugag

SEQ ID NO: 1385411 - RNA, 19 nt, Human
ugccagcacuauuuuaggu

SEQ ID NO: 1385412 - RNA, 18 nt, Human
ugcuuggauguauuguag

SEQ ID NO: 1385413 - RNA, 21 nt, Human
ugguccaucauauugagauuu

SEQ ID NO: 1385414 - RNA, 27 nt, Human
uuaaaaaaaaaauugguuuggcucuau

SEQ ID NO: 1385415 - RNA, 23 nt, Human
uuagugccucuuuuauggucucu

SEQ ID NO: 1385416 - RNA, 19 nt, Human
uuauccggaaauauccuac

SEQ ID NO: 1385417 - RNA, 23 nt, Human
uucacauuauugucaagagaguc

SEQ ID NO: 1385418 - RNA, 22 nt, Human
uuccaaauacauagaccaccau

SEQ ID NO: 1385419 - RNA, 20 nt, Human
uucugauggaccaugcugcu

SEQ ID NO: 1385420 - RNA, 27 nt, Human
uugcugaagauugagucaguguuucca

SEQ ID NO: 1385421 - RNA, 23 nt, Human
uugcuggcauuuugcagcugcau

SEQ ID NO: 1385422 - RNA, 22 nt, Human
uuggagauuacacugacaguga

SEQ ID NO: 1385423 - RNA, 25 nt, Human
uuucuguucccucagcaauucacau

SEQ ID NO: 1385424 - RNA, 20 nt, Human
uuugaaucuaccguuuaaua

SEQ ID NO: 1385425 - RNA, 20 nt, Human
uuuucaaaccacuuuugcug

SEQ ID NO: 1385426 - RNA, 18 nt, Human
uuuucagaaacaaucacc

SEQ ID NO: 1385427 - RNA, 23 nt, Human
uuuucuugcuggcauuuugcagc

SEQ ID NO: 1385428 - RNA, 23 nt, Human
uuuugcagcugcauauuauaucu

SEQ ID NO: 1385429 - RNA, 25 nt, Human
aaaaagcucuguccacucuaggacc

SEQ ID NO: 1385430 - RNA, 18 nt, Human
aacucaaggcuguagcag

SEQ ID NO: 1385431 - RNA, 24 nt, Human
aacucacuucuccagccucaaaac

SEQ ID NO: 1385432 - RNA, 27 nt, Human
aacucacuucuccagccucaaaacccu

SEQ ID NO: 1385433 - RNA, 20 nt, Human
aagacaacagccaugaccac

SEQ ID NO: 1385434 - RNA, 23 nt, Human
aagacaacagccaugaccacuga

SEQ ID NO: 1385435 - RNA, 19 nt, Human
aagagggccccgaggcaca

SEQ ID NO: 1385436 - RNA, 23 nt, Human
aagcaggagggagaaagacaaga

SEQ ID NO: 1385437 - RNA, 19 nt, Human
aaggaggucagauuuccaa

SEQ ID NO: 1385438 - RNA, 23 nt, Human
aaggccccagcacccccugccca

SEQ ID NO: 1385439 - RNA, 23 nt, Human
aagggccucaccugaaggggagg

SEQ ID NO: 1385440 - RNA, 18 nt, Human
aaguagcagauucugaaa

SEQ ID NO: 1385441 - RNA, 24 nt, Human
aaucuguuuguaaaagcccuucca

SEQ ID NO: 1385442 - RNA, 21 nt, Human
aauuccgcaaauucccugcug

SEQ ID NO: 1385443 - RNA, 21 nt, Human
acaaccccagggugccccucc

SEQ ID NO: 1385444 - RNA, 21 nt, Human
acacaaccccagggugccccu

SEQ ID NO: 1385445 - RNA, 22 nt, Human
acacaaccccagggugccccuc

SEQ ID NO: 1385446 - RNA, 19 nt, Human
acagaagcuauggucucaa

SEQ ID NO: 1385447 - RNA, 24 nt, Human
accacaucguuggcucuggacucc

SEQ ID NO: 1385448 - RNA, 21 nt, Human
acccagagaagaggaggcaac

SEQ ID NO: 1385449 - RNA, 24 nt, Human
accccaugcuuuuuccagaaacag

SEQ ID NO: 1385450 - RNA, 19 nt, Human
acccugucucaucucccag

SEQ ID NO: 1385451 - RNA, 25 nt, Human
accggccccgaggcugggcuucccu

SEQ ID NO: 1385452 - RNA, 18 nt, Human
acgacacacagggcagga

SEQ ID NO: 1385453 - RNA, 21 nt, Human
acuccugaugagaaauucugg

SEQ ID NO: 1385454 - RNA, 19 nt, Human
agaaagaaggcagaaaagg

SEQ ID NO: 1385455 - RNA, 23 nt, Human
agaaagacaagaacggucacaaa

SEQ ID NO: 1385456 - RNA, 22 nt, Human
agacaacagccaugaccacuga

SEQ ID NO: 1385457 - RNA, 23 nt, Human
agauaaaccagccuaggcuccaa

SEQ ID NO: 1385458 - RNA, 20 nt, Human
agauggggcaggcuguccug

SEQ ID NO: 1385459 - RNA, 21 nt, Human
agauggggcaggcuguccugg

SEQ ID NO: 1385460 - RNA, 19 nt, Human
agcuaggcaggugcagggc

SEQ ID NO: 1385461 - RNA, 24 nt, Human
aggaacucaaggcuguagcagccc

SEQ ID NO: 1385462 - RNA, 21 nt, Human
aggagcuaggcacaaaggagg

SEQ ID NO: 1385463 - RNA, 18 nt, Human
aggaggucagauuuccaa

SEQ ID NO: 1385464 - RNA, 20 nt, Human
aggagugccgggguuccugg

SEQ ID NO: 1385465 - RNA, 23 nt, Human
aggcagaaaagggccucaccuga

SEQ ID NO: 1385466 - RNA, 23 nt, Human
aggcagcuaggcaggugcagggc

SEQ ID NO: 1385467 - RNA, 21 nt, Human
aggccccagcacccccugccc

SEQ ID NO: 1385468 - RNA, 23 nt, Human
aggcguguccucucucuccaagg

SEQ ID NO: 1385469 - RNA, 22 nt, Human
agggaagggcagcauggagugu

SEQ ID NO: 1385470 - RNA, 19 nt, Human
agggcccuggugugcaggg

SEQ ID NO: 1385471 - RNA, 19 nt, Human
agggugccggggaagcagg

SEQ ID NO: 1385472 - RNA, 24 nt, Human
aggugcugaagauggucugaaacc

SEQ ID NO: 1385473 - RNA, 21 nt, Human
aggugggaagggaagcagagc

SEQ ID NO: 1385474 - RNA, 25 nt, Human
agugguucucaaagugugguuccag

SEQ ID NO: 1385475 - RNA, 19 nt, Human
aucuaccauauucccccca

SEQ ID NO: 1385476 - RNA, 21 nt, Human
auuaucugcaugaaucccagg

SEQ ID NO: 1385477 - RNA, 18 nt, Human
caaaaaaaucccuggaca

SEQ ID NO: 1385478 - RNA, 20 nt, Human
caaagggcaaggucuucugg

SEQ ID NO: 1385479 - RNA, 24 nt, Human
caacagccaugaccacugacaagc

SEQ ID NO: 1385480 - RNA, 18 nt, Human
caagagggccccgaggca

SEQ ID NO: 1385481 - RNA, 20 nt, Human
caaggcaagagggccccgag

SEQ ID NO: 1385482 - RNA, 19 nt, Human
caaucuguuuguaaaagcc

SEQ ID NO: 1385483 - RNA, 21 nt, Human
caaugauaaggcugugcacag

SEQ ID NO: 1385484 - RNA, 18 nt, Human
cacaaaaaaaucccugga

SEQ ID NO: 1385485 - RNA, 21 nt, Human
cacaaccccagggugccccuc

SEQ ID NO: 1385486 - RNA, 23 nt, Human
cacaaugaucuaccauauucccc

SEQ ID NO: 1385487 - RNA, 21 nt, Human
cacagggcaccugccugucac

SEQ ID NO: 1385488 - RNA, 21 nt, Human
caccacucucccucugucgua

SEQ ID NO: 1385489 - RNA, 23 nt, Human
caccccagagccccagcaauagc

SEQ ID NO: 1385490 - RNA, 21 nt, Human
cacccccugcccacugccgcc

SEQ ID NO: 1385491 - RNA, 21 nt, Human
cacugccugagccccugcacc

SEQ ID NO: 1385492 - RNA, 18 nt, Human
cacuggagaacacccaga

SEQ ID NO: 1385493 - RNA, 27 nt, Human
cagaugccccucuauucagagcugccc

SEQ ID NO: 1385494 - RNA, 19 nt, Human
cagcaauagcaggugcccc

SEQ ID NO: 1385495 - RNA, 22 nt, Human
cagcacuggguggccuugaggc

SEQ ID NO: 1385496 - RNA, 21 nt, Human
cagcaggaggggcacaccccg

SEQ ID NO: 1385497 - RNA, 24 nt, Human
cagccaugaccacugacaagcaag

SEQ ID NO: 1385498 - RNA, 25 nt, Human
cagccuguggcugcccuacccaggu

SEQ ID NO: 1385499 - RNA, 18 nt, Human
cagcuaaggacaggggua

SEQ ID NO: 1385500 - RNA, 23 nt, Human
cagcuggacagccugagguacuc

SEQ ID NO: 1385501 - RNA, 23 nt, Human
caggagcugggagggagcagaga

SEQ ID NO: 1385502 - RNA, 20 nt, Human
cagggaggugagcugggacc

SEQ ID NO: 1385503 - RNA, 21 nt, Human
caggguugcucugggaguggg

SEQ ID NO: 1385504 - RNA, 20 nt, Human
caggucaaagggcaaggucu

SEQ ID NO: 1385505 - RNA, 19 nt, Human
cauccccaccagggcagac

SEQ ID NO: 1385506 - RNA, 22 nt, Human
caugaccacugacaagcaaggg

SEQ ID NO: 1385507 - RNA, 20 nt, Human
caugagauucugcacccugc

SEQ ID NO: 1385508 - RNA, 23 nt, Human
cauuguacacucccaggcagaac

SEQ ID NO: 1385509 - RNA, 22 nt, Human
ccaacucacuucuccagccuca

SEQ ID NO: 1385510 - RNA, 22 nt, Human
ccaaggaaaaagcucuguccac

SEQ ID NO: 1385511 - RNA, 20 nt, Human
ccacaggcguguccucucuc

SEQ ID NO: 1385512 - RNA, 19 nt, Human
ccacagggccgugcugggc

SEQ ID NO: 1385513 - RNA, 22 nt, Human
ccacaucguuggcucuggacuc

SEQ ID NO: 1385514 - RNA, 22 nt, Human
ccacuuacucugccugaggggc

SEQ ID NO: 1385515 - RNA, 21 nt, Human
ccagaaacagcaaggucaggg

SEQ ID NO: 1385516 - RNA, 21 nt, Human
ccaggaaaagugagguucagg

SEQ ID NO: 1385517 - RNA, 18 nt, Human
ccaggcuguuggcaugga

SEQ ID NO: 1385518 - RNA, 20 nt, Human
ccaggugggugacagggugg

SEQ ID NO: 1385519 - RNA, 23 nt, Human
ccaguauaucaagaauguuuucc

SEQ ID NO: 1385520 - RNA, 22 nt, Human
ccaugggggcucagaaauggag

SEQ ID NO: 1385521 - RNA, 24 nt, Human
cccaacucacuucuccagccucaa

SEQ ID NO: 1385522 - RNA, 23 nt, Human
cccaaguagcagauucugaaaca

SEQ ID NO: 1385523 - RNA, 24 nt, Human
cccaccccaugcuuuuuccagaaa

SEQ ID NO: 1385524 - RNA, 18 nt, Human
cccaggccuccccacucc

SEQ ID NO: 1385525 - RNA, 20 nt, Human
ccccacaccccacagggccg

SEQ ID NO: 1385526 - RNA, 23 nt, Human
ccccacaccccacagggccgugc

SEQ ID NO: 1385527 - RNA, 20 nt, Human
ccccaccccaugcuuuuucc

SEQ ID NO: 1385528 - RNA, 23 nt, Human
ccccaccccaugcuuuuuccaga

SEQ ID NO: 1385529 - RNA, 24 nt, Human
ccccagcacccccugcccacugcc

SEQ ID NO: 1385530 - RNA, 18 nt, Human
ccccaggaaaagugaggu

SEQ ID NO: 1385531 - RNA, 18 nt, Human
ccccagggugccccuccc

SEQ ID NO: 1385532 - RNA, 19 nt, Human
ccccagggugccccucccu

SEQ ID NO: 1385533 - RNA, 19 nt, Human
ccccagucaggcuggacca

SEQ ID NO: 1385534 - RNA, 20 nt, Human
cccccacaccccacagggcc

SEQ ID NO: 1385535 - RNA, 18 nt, Human
ccccccacaccccacagg

SEQ ID NO: 1385536 - RNA, 18 nt, Human
cccccggcccaugugcca

SEQ ID NO: 1385537 - RNA, 21 nt, Human
cccccuagcacaugaagcugg

SEQ ID NO: 1385538 - RNA, 21 nt, Human
ccccggaacaggagauucccg

SEQ ID NO: 1385539 - RNA, 18 nt, Human
ccccugagugacacucug

SEQ ID NO: 1385540 - RNA, 21 nt, Human
ccccugagugacacucuguuc

SEQ ID NO: 1385541 - RNA, 23 nt, Human
ccccuucucagcagcuccgacuu

SEQ ID NO: 1385542 - RNA, 22 nt, Human
cccgaggcugggcuucccucug

SEQ ID NO: 1385543 - RNA, 21 nt, Human
cccgcucuggggagaagugca

SEQ ID NO: 1385544 - RNA, 21 nt, Human
cccggaacaggagauucccga

SEQ ID NO: 1385545 - RNA, 18 nt, Human
cccuacccaggccucccc

SEQ ID NO: 1385546 - RNA, 19 nt, Human
cccucccugccccacccca

SEQ ID NO: 1385547 - RNA, 23 nt, Human
cccugcaugaaggcccugagggc

SEQ ID NO: 1385548 - RNA, 23 nt, Human
cccugcccaggaucuggccaugg

SEQ ID NO: 1385549 - RNA, 19 nt, Human
cccugcuuccugccagggc

SEQ ID NO: 1385550 - RNA, 22 nt, Human
ccucaaaacccugaagagggcc

SEQ ID NO: 1385551 - RNA, 20 nt, Human
ccuccauguggacaugagau

SEQ ID NO: 1385552 - RNA, 24 nt, Human
ccucgcucagccuuggccuuagcc

SEQ ID NO: 1385553 - RNA, 22 nt, Human
ccugaaaauuccgcaaauuccc

SEQ ID NO: 1385554 - RNA, 20 nt, Human
ccugagccccugcacccaga

SEQ ID NO: 1385555 - RNA, 22 nt, Human
ccugagccccugcacccagagg

SEQ ID NO: 1385556 - RNA, 18 nt, Human
ccugccccagucaggcug

SEQ ID NO: 1385557 - RNA, 19 nt, Human
ccugggugggcacagaagc

SEQ ID NO: 1385558 - RNA, 20 nt, Human
ccuucuccccagcugggggu

SEQ ID NO: 1385559 - RNA, 21 nt, Human
cgggaggaauugaccugggua

SEQ ID NO: 1385560 - RNA, 21 nt, Human
cuagcacaugaagcugggcuu

SEQ ID NO: 1385561 - RNA, 24 nt, Human
cuauaccauuucucucggccucug

SEQ ID NO: 1385562 - RNA, 27 nt, Human
cucaaaacccugaagagggcccaaggg

SEQ ID NO: 1385563 - RNA, 23 nt, Human
cucaccacucucccucugucgua

SEQ ID NO: 1385564 - RNA, 27 nt, Human
cucagccuuggccuuagcacaaggugc

SEQ ID NO: 1385565 - RNA, 23 nt, Human
cuccaaacaggggcccgggagga

SEQ ID NO: 1385566 - RNA, 19 nt, Human
cuccaaggcaagagggccc

SEQ ID NO: 1385567 - RNA, 22 nt, Human
cucccaggcagaaccugccgua

SEQ ID NO: 1385568 - RNA, 24 nt, Human
cuccccacuccuaggcccuucagg

SEQ ID NO: 1385569 - RNA, 21 nt, Human
cuccuagugcagcaugugcug

SEQ ID NO: 1385570 - RNA, 20 nt, Human
cucucucucaccacucuccc

SEQ ID NO: 1385571 - RNA, 21 nt, Human
cugcugcagguggagcucagc

SEQ ID NO: 1385572 - RNA, 21 nt, Human
cugcuuccugccagggcggcu

SEQ ID NO: 1385573 - RNA, 24 nt, Human
cuggauguaaacaccucuggccau

SEQ ID NO: 1385574 - RNA, 18 nt, Human
cugggccucuguuuccuc

SEQ ID NO: 1385575 - RNA, 22 nt, Human
cuuaaugacagccugauggcuc

SEQ ID NO: 1385576 - RNA, 24 nt, Human
cuuugugacagugcccccugaguu

SEQ ID NO: 1385577 - RNA, 22 nt, Human
gaaauggaggagagggggccga

SEQ ID NO: 1385578 - RNA, 18 nt, Human
gaacacccagagaagagg

SEQ ID NO: 1385579 - RNA, 22 nt, Human
gaacauggcucuagcccaguac

SEQ ID NO: 1385580 - RNA, 21 nt, Human
gaagaacauggcucuagccca

SEQ ID NO: 1385581 - RNA, 24 nt, Human
gaauugcagcuaauccugccccag

SEQ ID NO: 1385582 - RNA, 25 nt, Human
gagaacacccagagaagagggaguc

SEQ ID NO: 1385583 - RNA, 19 nt, Human
gagaacccaaccgccaccc

SEQ ID NO: 1385584 - RNA, 22 nt, Human
gagagcacgccugccccaggac

SEQ ID NO: 1385585 - RNA, 25 nt, Human
gagcugggagggagcagagaaccca

SEQ ID NO: 1385586 - RNA, 25 nt, Human
gagcuggggaggguggaagccaggu

SEQ ID NO: 1385587 - RNA, 24 nt, Human
gagggagaaagacaagaacgguca

SEQ ID NO: 1385588 - RNA, 22 nt, Human
gauuuucuuucuguucucccuu

SEQ ID NO: 1385589 - RNA, 21 nt, Human
gcaauagcaggugccccaugc

SEQ ID NO: 1385590 - RNA, 26 nt, Human
gcacuauaccauuucucucggccucu

SEQ ID NO: 1385591 - RNA, 22 nt, Human
gcagaaaagggccucaccugaa

SEQ ID NO: 1385592 - RNA, 21 nt, Human
gccagcagcugcagcuccugg

SEQ ID NO: 1385593 - RNA, 21 nt, Human
gcccaugugccaugggugcug

SEQ ID NO: 1385594 - RNA, 18 nt, Human
gccccgaggcugggcuuc

SEQ ID NO: 1385595 - RNA, 21 nt, Human
gcccuacccaggccuccccac

SEQ ID NO: 1385596 - RNA, 18 nt, Human
gcccuggguuguucuacc

SEQ ID NO: 1385597 - RNA, 26 nt, Human
gcccuggugugcaggggccuuuugcc

SEQ ID NO: 1385598 - RNA, 22 nt, Human
gccgcuuggacaagccaucuuu

SEQ ID NO: 1385599 - RNA, 19 nt, Human
gccuaggcuccaagaagcc

SEQ ID NO: 1385600 - RNA, 18 nt, Human
gccugaaauaagccaggc

SEQ ID NO: 1385601 - RNA, 20 nt, Human
gcguguccucucucuccaag

SEQ ID NO: 1385602 - RNA, 21 nt, Human
gcuacggggucaaggagaggg

SEQ ID NO: 1385603 - RNA, 21 nt, Human
gcucagccuuggccuuagcac

SEQ ID NO: 1385604 - RNA, 18 nt, Human
gcucuggggagaagugca

SEQ ID NO: 1385605 - RNA, 24 nt, Human
gcugaagauggucugaaaccuggu

SEQ ID NO: 1385606 - RNA, 20 nt, Human
gcugaaugcaggagugccgg

SEQ ID NO: 1385607 - RNA, 20 nt, Human
gcuggguggucgucacgggc

SEQ ID NO: 1385608 - RNA, 20 nt, Human
gcuguuggcauggacaagga

SEQ ID NO: 1385609 - RNA, 24 nt, Human
gcuucacuccuagcccccaauggu

SEQ ID NO: 1385610 - RNA, 19 nt, Human
ggaaauaacacccucuugc

SEQ ID NO: 1385611 - RNA, 24 nt, Human
ggaacucaaggcuguagcagccuc

SEQ ID NO: 1385612 - RNA, 20 nt, Human
ggaagggaagcagagcugga

SEQ ID NO: 1385613 - RNA, 20 nt, Human
ggagauggagaacuggggga

SEQ ID NO: 1385614 - RNA, 21 nt, Human
ggagcuaggcacaaaggaggg

SEQ ID NO: 1385615 - RNA, 19 nt, Human
ggaggagagggggccgagg

SEQ ID NO: 1385616 - RNA, 19 nt, Human
ggaggagagggggccgagg

SEQ ID NO: 1385617 - RNA, 23 nt, Human
ggagguuucucccaggaaggcag

SEQ ID NO: 1385618 - RNA, 18 nt, Human
ggccagggcuuggggcca

SEQ ID NO: 1385619 - RNA, 20 nt, Human
ggcucugcuccuagugcagc

SEQ ID NO: 1385620 - RNA, 18 nt, Human
ggcugcugcagguggagc

SEQ ID NO: 1385621 - RNA, 19 nt, Human
ggcuggggcagauggggca

SEQ ID NO: 1385622 - RNA, 18 nt, Human
ggcuggguggucgucacg

SEQ ID NO: 1385623 - RNA, 21 nt, Human
gggaagcaggagggagaaaga

SEQ ID NO: 1385624 - RNA, 20 nt, Human
gggagagagagcacgccugc

SEQ ID NO: 1385625 - RNA, 21 nt, Human
gggagguggucaacacaaccc

SEQ ID NO: 1385626 - RNA, 21 nt, Human
gggcuggguggucgucacggg

SEQ ID NO: 1385627 - RNA, 25 nt, Human
ggggaggguggaagccagguguggg

SEQ ID NO: 1385628 - RNA, 23 nt, Human
ggggcucagaaauggaggagagg

SEQ ID NO: 1385629 - RNA, 19 nt, Human
ggggcuggggcagaugggg

SEQ ID NO: 1385630 - RNA, 23 nt, Human
ggggguggggccagcaaucuguu

SEQ ID NO: 1385631 - RNA, 25 nt, Human
ggguggaagccaggugugggguucu

SEQ ID NO: 1385632 - RNA, 19 nt, Human
ggguggguggugaugacag

SEQ ID NO: 1385633 - RNA, 19 nt, Human
ggguguuguacaaaaagcu

SEQ ID NO: 1385634 - RNA, 19 nt, Human
gguaaacacaaaaaaaucc

SEQ ID NO: 1385635 - RNA, 19 nt, Human
ggugggugacagggugggu

SEQ ID NO: 1385636 - RNA, 20 nt, Human
guagugaaugggcugccccu

SEQ ID NO: 1385637 - RNA, 19 nt, Human
gucaacacaaccccagggu

SEQ ID NO: 1385638 - RNA, 24 nt, Human
gucccaacucacuucuccagccuc

SEQ ID NO: 1385639 - RNA, 21 nt, Human
gugagguucaggcagaugccc

SEQ ID NO: 1385640 - RNA, 21 nt, Human
gugcugggcccuucuggaugu

SEQ ID NO: 1385641 - RNA, 21 nt, Human
guggagagugggcaggucaaa

SEQ ID NO: 1385642 - RNA, 24 nt, Human
guuuuccaggugggugacagggug

SEQ ID NO: 1385643 - RNA, 22 nt, Human
uacaaaaagcugccagcaugga

SEQ ID NO: 1385644 - RNA, 23 nt, Human
uaccauauuccccccacacccca

SEQ ID NO: 1385645 - RNA, 21 nt, Human
uaccauuucucucggccucug

SEQ ID NO: 1385646 - RNA, 20 nt, Human
uaccuggggugacgggcugg

SEQ ID NO: 1385647 - RNA, 24 nt, Human
uagaaagaaggcagaaaagggccu

SEQ ID NO: 1385648 - RNA, 18 nt, Human
uagugaaugggcugcccc

SEQ ID NO: 1385649 - RNA, 23 nt, Human
uaucacuagaggccagggcuugg

SEQ ID NO: 1385650 - RNA, 26 nt, Human
uauggagauggagaacugggggacac

SEQ ID NO: 1385651 - RNA, 23 nt, Human
ucaacacaaccccagggugcccc

SEQ ID NO: 1385652 - RNA, 23 nt, Human
ucaaggagagggccccaggaaaa

SEQ ID NO: 1385653 - RNA, 24 nt, Human
ucaggagcugggagggagcagaga

SEQ ID NO: 1385654 - RNA, 21 nt, Human
uccaagaagccacuggagaac

SEQ ID NO: 1385655 - RNA, 18 nt, Human
uccaaggcaagagggccc

SEQ ID NO: 1385656 - RNA, 23 nt, Human
uccacgggugcccccguuccugg

SEQ ID NO: 1385657 - RNA, 21 nt, Human
uccagaaacagcaaggucagg

SEQ ID NO: 1385658 - RNA, 19 nt, Human
ucccaacucacuucuccag

SEQ ID NO: 1385659 - RNA, 22 nt, Human
ucccagggagguuucucccagg

SEQ ID NO: 1385660 - RNA, 23 nt, Human
uccccagcuggggguggcaagac

SEQ ID NO: 1385661 - RNA, 20 nt, Human
ucccguaguccacgggugcc

SEQ ID NO: 1385662 - RNA, 18 nt, Human
ucccuggacacacucccc

SEQ ID NO: 1385663 - RNA, 18 nt, Human
uccgcaaauucccugcug

SEQ ID NO: 1385664 - RNA, 27 nt, Human
uccuagggcccuggugugcaggggccu

SEQ ID NO: 1385665 - RNA, 21 nt, Human
uccugccccagucaggcugga

SEQ ID NO: 1385666 - RNA, 24 nt, Human
uccuggagauggggcuagggugcc

SEQ ID NO: 1385667 - RNA, 20 nt, Human
uccugggccucuguuuccuc

SEQ ID NO: 1385668 - RNA, 21 nt, Human
uccugggccugccuucaauga

SEQ ID NO: 1385669 - RNA, 18 nt, Human
uccuuuauuaucauuauc

SEQ ID NO: 1385670 - RNA, 20 nt, Human
ucucaaagugugguuccagg

SEQ ID NO: 1385671 - RNA, 18 nt, Human
ucucaccacucucccucu

SEQ ID NO: 1385672 - RNA, 18 nt, Human
ucugccgauuguuccagg

SEQ ID NO: 1385673 - RNA, 21 nt, Human
ucuggcuggacgacacacagg

SEQ ID NO: 1385674 - RNA, 18 nt, Human
ucuuccuucuccccagcu

SEQ ID NO: 1385675 - RNA, 22 nt, Human
ucuuucucucucucaccacucu

SEQ ID NO: 1385676 - RNA, 18 nt, Human
ugaaacaaagcuggcucc

SEQ ID NO: 1385677 - RNA, 21 nt, Human
ugaaacaaagcuggcuccaag

SEQ ID NO: 1385678 - RNA, 23 nt, Human
ugaaugcaggagugccgggguuc

SEQ ID NO: 1385679 - RNA, 24 nt, Human
ugaccuccauguggacaugagauu

SEQ ID NO: 1385680 - RNA, 20 nt, Human
ugcccacugccgccuccccc

SEQ ID NO: 1385681 - RNA, 22 nt, Human
ugccugaggggcuccuggagau

SEQ ID NO: 1385682 - RNA, 19 nt, Human
ugccugggugggcacagaa

SEQ ID NO: 1385683 - RNA, 22 nt, Human
ugccugggugggcacagaagcu

SEQ ID NO: 1385684 - RNA, 18 nt, Human
ugcucugggagugggugu

SEQ ID NO: 1385685 - RNA, 18 nt, Human
ugcucuugcuuugggguc

SEQ ID NO: 1385686 - RNA, 23 nt, Human
uggagaacacccagagaagagga

SEQ ID NO: 1385687 - RNA, 21 nt, Human
uggauguaaacaccucuggcc

SEQ ID NO: 1385688 - RNA, 20 nt, Human
uggauucgcaggagcuaggc

SEQ ID NO: 1385689 - RNA, 19 nt, Human
uggccuugaggccacuccu

SEQ ID NO: 1385690 - RNA, 23 nt, Human
uggcuacggggucaaggagaggg

SEQ ID NO: 1385691 - RNA, 18 nt, Human
uggcuccaaggcaagagg

SEQ ID NO: 1385692 - RNA, 18 nt, Human
uggcucuggacuccaacc

SEQ ID NO: 1385693 - RNA, 22 nt, Human
uggcugcaucuuccuuuggugu

SEQ ID NO: 1385694 - RNA, 18 nt, Human
ugggagagagagcacgcc

SEQ ID NO: 1385695 - RNA, 19 nt, Human
ugggcaggucaaagggcaa

SEQ ID NO: 1385696 - RNA, 26 nt, Human
ugggcucuuggccacugccugagccc

SEQ ID NO: 1385697 - RNA, 19 nt, Human
uggggaggguggaagccag

SEQ ID NO: 1385698 - RNA, 22 nt, Human
uggggcaggcuguccugggccu

SEQ ID NO: 1385699 - RNA, 18 nt, Human
uggggccagcaaucuguu

SEQ ID NO: 1385700 - RNA, 19 nt, Human
uggggccauggucucccag

SEQ ID NO: 1385701 - RNA, 21 nt, Human
ugggggguggggccagcaauc

SEQ ID NO: 1385702 - RNA, 22 nt, Human
ugggggguggggccagcaaucu

SEQ ID NO: 1385703 - RNA, 23 nt, Human
uggugguggcuacggggucaagg

SEQ ID NO: 1385704 - RNA, 28 nt, Human
uggugugcaggggccuuuugggcggggc

SEQ ID NO: 1385705 - RNA, 19 nt, Human
uguacacucccaggcagaa

SEQ ID NO: 1385706 - RNA, 18 nt, Human
uguagugaaugggcugcc

SEQ ID NO: 1385707 - RNA, 22 nt, Human
uuccuggguuuucugccgauug

SEQ ID NO: 1385708 - RNA, 20 nt, Human
uuccuggugaggggcucugg

SEQ ID NO: 1385709 - RNA, 22 nt, Human
uucuccagccucaaaacccuga

SEQ ID NO: 1385710 - RNA, 20 nt, Human
uuggcaaccccagggccuuu

SEQ ID NO: 1385711 - RNA, 22 nt, Human
uuguuccagguucaggagcugg

SEQ ID NO: 1385712 - RNA, 24 nt, Human
uuuccaggugggugacaggguggg

SEQ ID NO: 1385713 - RNA, 22 nt, Human
uuugagaacgacugguuuagac

SEQ ID NO: 1385714 - RNA, 21 nt, Human
uuuggggucaguguuuguacc

SEQ ID NO: 1385715 - RNA, 21 nt, Human
uuugugacagugcccccugag

SEQ ID NO: 1385716 - RNA, 18 nt, Human
agucaggaaacacaugug

SEQ ID NO: 1385717 - RNA, 18 nt, Human
augaaaauggggagcagg

SEQ ID NO: 1385718 - RNA, 21 nt, Human
caacuggucuucagagcugaa

SEQ ID NO: 1385719 - RNA, 26 nt, Human
cauccugagcucaguccccaaucucc

SEQ ID NO: 1385720 - RNA, 22 nt, Human
ccacccagagacaucugguauc

SEQ ID NO: 1385721 - RNA, 21 nt, Human
ccaccugucccaacccagggu

SEQ ID NO: 1385722 - RNA, 25 nt, Human
ccacuggauaaaucugaguucacac

SEQ ID NO: 1385723 - RNA, 19 nt, Human
cccaacccaggguacccac

SEQ ID NO: 1385724 - RNA, 21 nt, Human
cccaugaaaauggggagcagg

SEQ ID NO: 1385725 - RNA, 19 nt, Human
ccccaaucucccaccagcc

SEQ ID NO: 1385726 - RNA, 28 nt, Human
ccuacuuccauccugagcucagucccca

SEQ ID NO: 1385727 - RNA, 23 nt, Human
cucaggccccuccacuucucaga

SEQ ID NO: 1385728 - RNA, 20 nt, Human
gggagcaggcuguaacagau

SEQ ID NO: 1385729 - RNA, 18 nt, Human
ucccaacccaggguaccc

SEQ ID NO: 1385730 - RNA, 18 nt, Human
ucugaccuaaaugugaag

SEQ ID NO: 1385731 - RNA, 21 nt, Human
ugagcucaguccccaaucucc

SEQ ID NO: 1385732 - RNA, 18 nt, Human
uggucuucagagcugaag

SEQ ID NO: 1385733 - RNA, 23 nt, Human
uuguccacauguuccuaccaccu

SEQ ID NO: 1385734 - RNA, 19 nt, Human
aaacaccacaaugaugaaa

SEQ ID NO: 1385735 - RNA, 21 nt, Human
aacacaggugccugguuaggc

SEQ ID NO: 1385736 - RNA, 18 nt, Human
aagcaccuuuaaugagag

SEQ ID NO: 1385737 - RNA, 23 nt, Human
acaaugaugaaaauaccaagcac

SEQ ID NO: 1385738 - RNA, 21 nt, Human
cacagucagguagacaaacac

SEQ ID NO: 1385739 - RNA, 22 nt, Human
cgcuuggagcauugcuuugcuc

SEQ ID NO: 1385740 - RNA, 19 nt, Human
gacuuauuuuccacaguca

SEQ ID NO: 1385741 - RNA, 22 nt, Human
gcccagacaccgaucugugaga

SEQ ID NO: 1385742 - RNA, 18 nt, Human
gccugcucaaauauggaa

SEQ ID NO: 1385743 - RNA, 20 nt, Human
gcuccuaaauuacuuaacca

SEQ ID NO: 1385744 - RNA, 18 nt, Human
ggaaggcucccugcaagg

SEQ ID NO: 1385745 - RNA, 21 nt, Human
ggaaggcucccugcaagggag

SEQ ID NO: 1385746 - RNA, 21 nt, Human
gugccugguuaggcagguucc

SEQ ID NO: 1385747 - RNA, 22 nt, Human
uagaaguuuggccucuuuucug

SEQ ID NO: 1385748 - RNA, 22 nt, Human
uaggcuggcccuucaggguagu

SEQ ID NO: 1385749 - RNA, 20 nt, Human
ugaaaauaccaagcacagca

SEQ ID NO: 1385750 - RNA, 27 nt, Human
ugauagaaguuuggccucuuuucugau

SEQ ID NO: 1385751 - RNA, 24 nt, Human
aagcuuguuuuccugcaacuggau

SEQ ID NO: 1385752 - RNA, 23 nt, Human
agauggagccauuacacugagcc

SEQ ID NO: 1385753 - RNA, 20 nt, Human
caccccuaagcucgcaggac

SEQ ID NO: 1385754 - RNA, 21 nt, Human
caccccuaagcucgcaggaca

SEQ ID NO: 1385755 - RNA, 25 nt, Human
caccugaauaacauguugcccaguc

SEQ ID NO: 1385756 - RNA, 18 nt, Human
caguaugugguagcuuga

SEQ ID NO: 1385757 - RNA, 24 nt, Human
cagucagucucucuuccuggauuc

SEQ ID NO: 1385758 - RNA, 22 nt, Human
ccaccugaauaacauguugccc

SEQ ID NO: 1385759 - RNA, 22 nt, Human
ccuuguccugugcaucucuuuc

SEQ ID NO: 1385760 - RNA, 18 nt, Human
cgaaaggauccaucccau

SEQ ID NO: 1385761 - RNA, 20 nt, Human
gcccugugguuggagaccgc

SEQ ID NO: 1385762 - RNA, 18 nt, Human
uaacagaaaauaaggugg

SEQ ID NO: 1385763 - RNA, 23 nt, Human
uaacagaaaauaagguggccaga

SEQ ID NO: 1385764 - RNA, 25 nt, Human
ucaacaguaugugguagcuugaguc

SEQ ID NO: 1385765 - RNA, 24 nt, Human
ucaagugcauucgaaaggauccau

SEQ ID NO: 1385766 - RNA, 21 nt, Human
ucuguggcccugugguuggag

SEQ ID NO: 1385767 - RNA, 21 nt, Human
uuuuccugcaacuggaugguc

SEQ ID NO: 1385768 - RNA, 23 nt, Human
aaaaugccuccauaucccaaauu

SEQ ID NO: 1385769 - RNA, 23 nt, Human
aacaucuccguauaccaaguagc

SEQ ID NO: 1385770 - RNA, 18 nt, Human
aaguaguagugacagaag

SEQ ID NO: 1385771 - RNA, 19 nt, Human
aauacauuucacauggaau

SEQ ID NO: 1385772 - RNA, 21 nt, Human
aauggaagauaauuaucuaaa

SEQ ID NO: 1385773 - RNA, 25 nt, Human
aaugucaaccuugcaguuuaaacaa

SEQ ID NO: 1385774 - RNA, 23 nt, Human
acaacacaauaaaugucaaccuu

SEQ ID NO: 1385775 - RNA, 23 nt, Human
acauuagaucgaaauuaacuuag

SEQ ID NO: 1385776 - RNA, 23 nt, Human
aggauccaaagaguuauuuugaa

SEQ ID NO: 1385777 - RNA, 25 nt, Human
aguaaaugguugauggcccauacaa

SEQ ID NO: 1385778 - RNA, 18 nt, Human
agugccagucuugguucg

SEQ ID NO: 1385779 - RNA, 26 nt, Human
augugaacauacacaaacauauucuu

SEQ ID NO: 1385780 - RNA, 19 nt, Human
cacaacacaauaaauguca

SEQ ID NO: 1385781 - RNA, 22 nt, Human
caguaggcuaucucuguaggau

SEQ ID NO: 1385782 - RNA, 21 nt, Human
ccagaccugcaucuggcuugu

SEQ ID NO: 1385783 - RNA, 23 nt, Human
cuggugcagugugaaucuuucuu

SEQ ID NO: 1385784 - RNA, 21 nt, Human
cuuagacacaacacaauaaau

SEQ ID NO: 1385785 - RNA, 18 nt, Human
cuuuccucuuucuuggcu

SEQ ID NO: 1385786 - RNA, 22 nt, Human
gaacauacacaaacauauucuu

SEQ ID NO: 1385787 - RNA, 19 nt, Human
guaaaugacagaacacuuu

SEQ ID NO: 1385788 - RNA, 18 nt, Human
guucgugcuuggcugaca

SEQ ID NO: 1385789 - RNA, 25 nt, Human
uaaguaguagugacagaagauaaaa

SEQ ID NO: 1385790 - RNA, 23 nt, Human
uaauaggucuugugguggugaau

SEQ ID NO: 1385791 - RNA, 24 nt, Human
uagacacaacacaauaaaugucaa

SEQ ID NO: 1385792 - RNA, 22 nt, Human
uagaucgaaauuaacuuagaca

SEQ ID NO: 1385793 - RNA, 19 nt, Human
uagauugaaagauuaauga

SEQ ID NO: 1385794 - RNA, 23 nt, Human
uauuuaaaauggaagauaauuau

SEQ ID NO: 1385795 - RNA, 23 nt, Human
ucagaguuuuaaguaguagugac

SEQ ID NO: 1385796 - RNA, 23 nt, Human
uccaaagaguuauuuugaacccc

SEQ ID NO: 1385797 - RNA, 21 nt, Human
ucugcaaacuugacauuaaag

SEQ ID NO: 1385798 - RNA, 23 nt, Human
ucuugugguggugaauaauuaga

SEQ ID NO: 1385799 - RNA, 23 nt, Human
ugauagugaaauauuauaagcac

SEQ ID NO: 1385800 - RNA, 19 nt, Human
ugcaaacuugacauuaaag

SEQ ID NO: 1385801 - RNA, 19 nt, Human
ugccagucuugguucgugc

SEQ ID NO: 1385802 - RNA, 21 nt, Human
ugugaacauacacaaacauag

SEQ ID NO: 1385803 - RNA, 24 nt, Human
ugugaaucuuucuucuuagggugu

SEQ ID NO: 1385804 - RNA, 23 nt, Human
ugugguggugaauaauuagauug

SEQ ID NO: 1385805 - RNA, 26 nt, Human
uuagcaaaaaaaucuaacauaaucau

SEQ ID NO: 1385806 - RNA, 22 nt, Human
uuauuaguuagcaaaaaaaucu

SEQ ID NO: 1385807 - RNA, 19 nt, Human
uucacagaggcuagaauca

SEQ ID NO: 1385808 - RNA, 24 nt, Human
uugauggcccauacaauauucucu

SEQ ID NO: 1385809 - RNA, 23 nt, Human
uugauggggguacaagguagugg

SEQ ID NO: 1385810 - RNA, 20 nt, Human
uuugucauuaaucaauacaa

SEQ ID NO: 1385811 - RNA, 27 nt, Human
uuuucagagacaauucuucgggucacc

SEQ ID NO: 1385812 - RNA, 27 nt, Human
aaaaagcaccugcugcaccguaagccc

SEQ ID NO: 1385813 - RNA, 25 nt, Human
aaaauucuucccaugagagugacuu

SEQ ID NO: 1385814 - RNA, 24 nt, Human
aaaguuuuauccgcuuucccauau

SEQ ID NO: 1385815 - RNA, 26 nt, Human
accaguuccggaagaaccugcgggac

SEQ ID NO: 1385816 - RNA, 22 nt, Human
accccaggaccccugcuguccu

SEQ ID NO: 1385817 - RNA, 18 nt, Human
agacugugcucccuuugg

SEQ ID NO: 1385818 - RNA, 19 nt, Human
agcugggugcagacugugc

SEQ ID NO: 1385819 - RNA, 22 nt, Human
aggaccccugcuguccuucccg

SEQ ID NO: 1385820 - RNA, 20 nt, Human
agggauguggcagcugcagu

SEQ ID NO: 1385821 - RNA, 26 nt, Human
caccguaagcccagggauguggcagc

SEQ ID NO: 1385822 - RNA, 20 nt, Human
cagaggcuaaaaccccagga

SEQ ID NO: 1385823 - RNA, 20 nt, Human
cagcagugguacugccuggu

SEQ ID NO: 1385824 - RNA, 19 nt, Human
cccaggaccccugcugucc

SEQ ID NO: 1385825 - RNA, 21 nt, Human
ccuucccgcagcuucuucuug

SEQ ID NO: 1385826 - RNA, 18 nt, Human
cgaugggaugagagcugg

SEQ ID NO: 1385827 - RNA, 19 nt, Human
cuaaaaccccaggaccccu

SEQ ID NO: 1385828 - RNA, 22 nt, Human
cuaaaaccccaggaccccugcu

SEQ ID NO: 1385829 - RNA, 18 nt, Human
cuuccucucuucuucugu

SEQ ID NO: 1385830 - RNA, 18 nt, Human
cuuuucucaaacuuuccu

SEQ ID NO: 1385831 - RNA, 19 nt, Human
gaggcuuggaaacgcuucc

SEQ ID NO: 1385832 - RNA, 21 nt, Human
gcacccacacgcuuagauagc

SEQ ID NO: 1385833 - RNA, 22 nt, Human
gcagcaccucccaguggccaga

SEQ ID NO: 1385834 - RNA, 23 nt, Human
ggcaguuugugguuccugauuug

SEQ ID NO: 1385835 - RNA, 20 nt, Human
ggccagaggcuaaaacccca

SEQ ID NO: 1385836 - RNA, 21 nt, Human
ggugcagacugugcuccccgg

SEQ ID NO: 1385837 - RNA, 20 nt, Human
gugaccucugcagaacuccu

SEQ ID NO: 1385838 - RNA, 22 nt, Human
guucugugacuucccugugacc

SEQ ID NO: 1385839 - RNA, 20 nt, Human
ucccgcagcuucuucuugga

SEQ ID NO: 1385840 - RNA, 22 nt, Human
ucugugacccgggaagcuuugg

SEQ ID NO: 1385841 - RNA, 21 nt, Human
ucuucuguucuucacgcccca

SEQ ID NO: 1385842 - RNA, 18 nt, Human
ugacuucccugugaccuc

SEQ ID NO: 1385843 - RNA, 20 nt, Human
ugcguuuggucuccaggugu

SEQ ID NO: 1385844 - RNA, 22 nt, Human
ugcugcaccguaagcccaggga

SEQ ID NO: 1385845 - RNA, 20 nt, Human
ugggaugagagcugggugca

SEQ ID NO: 1385846 - RNA, 24 nt, Human
ugggugcagacugugcucccuuug

SEQ ID NO: 1385847 - RNA, 24 nt, Human
uguggcagcugcagugggcuuggc

SEQ ID NO: 1385848 - RNA, 23 nt, Human
uuccaguccaaugaaaguuuuau

SEQ ID NO: 1385849 - RNA, 24 nt, Human
uucccauauaaaaauucuucccau

SEQ ID NO: 1385850 - RNA, 19 nt, Human
uuccggaagaaccugcggg

SEQ ID NO: 1385851 - RNA, 20 nt, Human
uucuucuguucuucacgccc

SEQ ID NO: 1385852 - RNA, 27 nt, Human
uugaaaaaagcaccugcugcaccguaa

SEQ ID NO: 1385853 - RNA, 18 nt, Human
uugauuucuucucuggag

SEQ ID NO: 1385854 - RNA, 18 nt, Human
uugguucugugacccggg

SEQ ID NO: 1385855 - RNA, 23 nt, Human
uuuauccgcuuucccauauaaaa

SEQ ID NO: 1385856 - RNA, 24 nt, Human
aacccacucccuuaagcccauuug

SEQ ID NO: 1385857 - RNA, 23 nt, Human
aagcuuacaaagauauaaucuga

SEQ ID NO: 1385858 - RNA, 22 nt, Human
acacacacacucccaggaguuu

SEQ ID NO: 1385859 - RNA, 21 nt, Human
acacacacucccaggaguuua

SEQ ID NO: 1385860 - RNA, 19 nt, Human
acucccuuaagcccauuug

SEQ ID NO: 1385861 - RNA, 18 nt, Human
agacuauuuauuacugcc

SEQ ID NO: 1385862 - RNA, 18 nt, Human
agcaguggcuugugguuc

SEQ ID NO: 1385863 - RNA, 23 nt, Human
agcaguggcuugugguucuccuu

SEQ ID NO: 1385864 - RNA, 25 nt, Human
caacacugcuuuaacugcaucccaa

SEQ ID NO: 1385865 - RNA, 21 nt, Human
cacugcuuuaacugcauccca

SEQ ID NO: 1385866 - RNA, 20 nt, Human
ccuaauccugacccuuggcc

SEQ ID NO: 1385867 - RNA, 21 nt, Human
cggugcuauaaauuucccuca

SEQ ID NO: 1385868 - RNA, 20 nt, Human
cguucaggagcagguuguuc

SEQ ID NO: 1385869 - RNA, 23 nt, Human
cucaacacugcuuuaacugcauc

SEQ ID NO: 1385870 - RNA, 19 nt, Human
cucuugguucucuaguucu

SEQ ID NO: 1385871 - RNA, 22 nt, Human
cucuuuguccucacugguuuca

SEQ ID NO: 1385872 - RNA, 20 nt, Human
cugugggcuaaguggugaua

SEQ ID NO: 1385873 - RNA, 23 nt, Human
gcaaagagcaaaaauauuuugag

SEQ ID NO: 1385874 - RNA, 24 nt, Human
gguggauaagcuuuuugauguucu

SEQ ID NO: 1385875 - RNA, 20 nt, Human
gucguucaggagcagguugu

SEQ ID NO: 1385876 - RNA, 24 nt, Human
guucugcucugaucuugauguuuu

SEQ ID NO: 1385877 - RNA, 23 nt, Human
uaaaacacacacacacucccagg

SEQ ID NO: 1385878 - RNA, 24 nt, Human
uaacugcaucccaaagauucuggu

SEQ ID NO: 1385879 - RNA, 20 nt, Human
uagaagguaaugaacccacu

SEQ ID NO: 1385880 - RNA, 25 nt, Human
uagaagguaaugaacccacucccuu

SEQ ID NO: 1385881 - RNA, 19 nt, Human
uagaauucagcuguaaauc

SEQ ID NO: 1385882 - RNA, 21 nt, Human
uauuuuauucucucuguagca

SEQ ID NO: 1385883 - RNA, 20 nt, Human
ucaggagcagguuguucaau

SEQ ID NO: 1385884 - RNA, 18 nt, Human
uccaugaaggcucuaccc

SEQ ID NO: 1385885 - RNA, 19 nt, Human
ucccucaacacugcuuuaa

SEQ ID NO: 1385886 - RNA, 21 nt, Human
uccucacguggaggaagggau

SEQ ID NO: 1385887 - RNA, 18 nt, Human
uccuuaagcaguggcuug

SEQ ID NO: 1385888 - RNA, 24 nt, Human
ucguucaggagcagguuguucaau

SEQ ID NO: 1385889 - RNA, 18 nt, Human
ucuccuugaaaaggucau

SEQ ID NO: 1385890 - RNA, 19 nt, Human
ucucuaguucuuuuaguug

SEQ ID NO: 1385891 - RNA, 21 nt, Human
ucucuuaaagcuuacaaagau

SEQ ID NO: 1385892 - RNA, 20 nt, Human
ucugcucugaucuugauguu

SEQ ID NO: 1385893 - RNA, 18 nt, Human
ucuuaaagcuuacaaaga

SEQ ID NO: 1385894 - RNA, 23 nt, Human
ugaaggcucuacccucauaacuu

SEQ ID NO: 1385895 - RNA, 18 nt, Human
ugagugaguuucuuaauc

SEQ ID NO: 1385896 - RNA, 23 nt, Human
ugagugaguuucuuaaucuugug

SEQ ID NO: 1385897 - RNA, 19 nt, Human
ugaguuauggagaaauccc

SEQ ID NO: 1385898 - RNA, 23 nt, Human
ugaguuauggagaaaucccuccu

SEQ ID NO: 1385899 - RNA, 22 nt, Human
ugauauacccuuaaccauuuuu

SEQ ID NO: 1385900 - RNA, 18 nt, Human
ugaucgugguggauaagc

SEQ ID NO: 1385901 - RNA, 21 nt, Human
ugaugaagccaacuugaucgu

SEQ ID NO: 1385902 - RNA, 19 nt, Human
ugauguuuuuuuuuuuguc

SEQ ID NO: 1385903 - RNA, 25 nt, Human
ugauuugagaucuuucuaacuuuuu

SEQ ID NO: 1385904 - RNA, 25 nt, Human
ugcaaagagcaaaaauauuuugagc

SEQ ID NO: 1385905 - RNA, 23 nt, Human
ugcuauaaauuucccucaacacu

SEQ ID NO: 1385906 - RNA, 20 nt, Human
uggaggaagggauagaaggu

SEQ ID NO: 1385907 - RNA, 23 nt, Human
ugggaggguguaugugcccagga

SEQ ID NO: 1385908 - RNA, 22 nt, Human
ugggguuuguuugcucuugguu

SEQ ID NO: 1385909 - RNA, 21 nt, Human
ugguagacuauuuauuacugc

SEQ ID NO: 1385910 - RNA, 21 nt, Human
ugugguuuugagugaguuucu

SEQ ID NO: 1385911 - RNA, 24 nt, Human
ugugguuuugagugaguuucuuaa

SEQ ID NO: 1385912 - RNA, 22 nt, Human
uuaagcccauuuguaagagccu

SEQ ID NO: 1385913 - RNA, 24 nt, Human
uuaaggguuuuucauaucucuauc

SEQ ID NO: 1385914 - RNA, 21 nt, Human
uuccuuaagcaguggcuugug

SEQ ID NO: 1385915 - RNA, 21 nt, Human
uuccuuccaugaaggcucuac

SEQ ID NO: 1385916 - RNA, 26 nt, Human
uugauuugagaucuuucuaacuuuuu

SEQ ID NO: 1385917 - RNA, 20 nt, Human
uuggaacaguuucagaagaa

SEQ ID NO: 1385918 - RNA, 18 nt, Human
uugggagaauacauucag

SEQ ID NO: 1385919 - RNA, 21 nt, Human
uugucucuuuguccucacugg

SEQ ID NO: 1385920 - RNA, 19 nt, Human
uuguucaauuuccauguag

SEQ ID NO: 1385921 - RNA, 25 nt, Human
uuuauaguauucucugauggcuguu

SEQ ID NO: 1385922 - RNA, 24 nt, Human
aaagcuuggcugguuuucagauaa

SEQ ID NO: 1385923 - RNA, 20 nt, Human
aacauagugaaaccccgucu

SEQ ID NO: 1385924 - RNA, 21 nt, Human
aacauagugaaaccccgucuc

SEQ ID NO: 1385925 - RNA, 25 nt, Human
aaccacaugggcuccuucaggccuu

SEQ ID NO: 1385926 - RNA, 20 nt, Human
aaccugcuccuuccccaucu

SEQ ID NO: 1385927 - RNA, 22 nt, Human
aacugcacauggggucuccagc

SEQ ID NO: 1385928 - RNA, 20 nt, Human
aacugguguuuuuuuuccuc

SEQ ID NO: 1385929 - RNA, 20 nt, Human
aagcacaaaauauaaacaac

SEQ ID NO: 1385930 - RNA, 21 nt, Human
aagucaguggcaaccaguagc

SEQ ID NO: 1385931 - RNA, 24 nt, Human
aaucacuugaauccgggaggcaga

SEQ ID NO: 1385932 - RNA, 20 nt, Human
aauccuucucaaauucagcc

SEQ ID NO: 1385933 - RNA, 21 nt, Human
aaucuccuucccugugaucuc

SEQ ID NO: 1385934 - RNA, 18 nt, Human
acaccucccagaguaucc

SEQ ID NO: 1385935 - RNA, 23 nt, Human
acaugcaugagacacagcacacg

SEQ ID NO: 1385936 - RNA, 18 nt, Human
accccgucucuacuaaaa

SEQ ID NO: 1385937 - RNA, 18 nt, Human
acuguuggcuucccggag

SEQ ID NO: 1385938 - RNA, 18 nt, Human
acuugaauccgggaggca

SEQ ID NO: 1385939 - RNA, 26 nt, Human
agaacagcaauagacuuucaagagga

SEQ ID NO: 1385940 - RNA, 18 nt, Human
agacaggggaaucacuug

SEQ ID NO: 1385941 - RNA, 24 nt, Human
agacaggggaaucacuugaauccg

SEQ ID NO: 1385942 - RNA, 19 nt, Human
agacaugucauggcugagu

SEQ ID NO: 1385943 - RNA, 21 nt, Human
agacuccuucauccugcagaa

SEQ ID NO: 1385944 - RNA, 18 nt, Human
agagauuggacaugggug

SEQ ID NO: 1385945 - RNA, 22 nt, Human
agagguugcagugagcugagau

SEQ ID NO: 1385946 - RNA, 24 nt, Human
agagguugcagugagcugagaucg

SEQ ID NO: 1385947 - RNA, 24 nt, Human
agagugaagggaagaagugugucg

SEQ ID NO: 1385948 - RNA, 18 nt, Human
agcagcaggagggaagcc

SEQ ID NO: 1385949 - RNA, 22 nt, Human
agcauuuaccuccugcugccag

SEQ ID NO: 1385950 - RNA, 22 nt, Human
agccuggccaacauagugaaac

SEQ ID NO: 1385951 - RNA, 24 nt, Human
agccuggccaacauagugaaaccc

SEQ ID NO: 1385952 - RNA, 23 nt, Human
aggaaaggacaauaccaguaugu

SEQ ID NO: 1385953 - RNA, 20 nt, Human
aggcagagguugcagugagc

SEQ ID NO: 1385954 - RNA, 24 nt, Human
aggcagagguugcagugagcugag

SEQ ID NO: 1385955 - RNA, 20 nt, Human
aggccaaggcgggcggcuca

SEQ ID NO: 1385956 - RNA, 23 nt, Human
aggccaaggcgggcggcucauga

SEQ ID NO: 1385957 - RNA, 24 nt, Human
aggcgggcggcucaugaggucagg

SEQ ID NO: 1385958 - RNA, 24 nt, Human
aggcugagacaggggaaucacuug

SEQ ID NO: 1385959 - RNA, 21 nt, Human
aggugugguggcucacuccug

SEQ ID NO: 1385960 - RNA, 22 nt, Human
aguggccaggugugguggcuca

SEQ ID NO: 1385961 - RNA, 25 nt, Human
auauuuccugaaggccuucagcauc

SEQ ID NO: 1385962 - RNA, 23 nt, Human
caaaagaaagaggccguaaauga

SEQ ID NO: 1385963 - RNA, 24 nt, Human
caacauagugaaaccccgucucua

SEQ ID NO: 1385964 - RNA, 24 nt, Human
caaggcgggcggcucaugagguca

SEQ ID NO: 1385965 - RNA, 21 nt, Human
caccuccaaucuccuucccug

SEQ ID NO: 1385966 - RNA, 22 nt, Human
cacuguaaucccagcuacuugg

SEQ ID NO: 1385967 - RNA, 23 nt, Human
cacuguaaucccagcuacuuggg

SEQ ID NO: 1385968 - RNA, 22 nt, Human
cagcacuuugggaggccaaggc

SEQ ID NO: 1385969 - RNA, 24 nt, Human
cagcacuuugggaggccaaggcgg

SEQ ID NO: 1385970 - RNA, 18 nt, Human
caggagaagaggugagag

SEQ ID NO: 1385971 - RNA, 21 nt, Human
caucugauuuaccaacuguuc

SEQ ID NO: 1385972 - RNA, 22 nt, Human
cauugcauuccaaucccgggug

SEQ ID NO: 1385973 - RNA, 19 nt, Human
ccacugcucucuggaucac

SEQ ID NO: 1385974 - RNA, 23 nt, Human
ccacugcucucuggaucacacug

SEQ ID NO: 1385975 - RNA, 19 nt, Human
ccagcgucucccacugcuc

SEQ ID NO: 1385976 - RNA, 22 nt, Human
ccagcgucucccacugcucucu

SEQ ID NO: 1385977 - RNA, 18 nt, Human
ccaguacccgaugaaccu

SEQ ID NO: 1385978 - RNA, 20 nt, Human
cccaacacuggccucagcau

SEQ ID NO: 1385979 - RNA, 24 nt, Human
cccugugguucuggaagaugaggc

SEQ ID NO: 1385980 - RNA, 21 nt, Human
ccuacugcaaaacuucaagga

SEQ ID NO: 1385981 - RNA, 23 nt, Human
ccucaggacacaucugccucucc

SEQ ID NO: 1385982 - RNA, 23 nt, Human
ccuggccaacauagugaaacccc

SEQ ID NO: 1385983 - RNA, 24 nt, Human
ccuggccaacauagugaaaccccg

SEQ ID NO: 1385984 - RNA, 20 nt, Human
ccugucacgucccagcacuu

SEQ ID NO: 1385985 - RNA, 22 nt, Human
ccugucacgucccagcacuuug

SEQ ID NO: 1385986 - RNA, 23 nt, Human
cgacucacacccuucuuccucaa

SEQ ID NO: 1385987 - RNA, 24 nt, Human
cgagaccagccuggccaacauagu

SEQ ID NO: 1385988 - RNA, 24 nt, Human
cggcucaugaggucaggaguucga

SEQ ID NO: 1385989 - RNA, 24 nt, Human
cgggaggcagagguugcagugagc

SEQ ID NO: 1385990 - RNA, 22 nt, Human
cgggcggcucaugaggucagga

SEQ ID NO: 1385991 - RNA, 20 nt, Human
cuaagucccauuuggccaaa

SEQ ID NO: 1385992 - RNA, 19 nt, Human
cucacuccugucacguccc

SEQ ID NO: 1385993 - RNA, 19 nt, Human
cucauacaccaucgugagc

SEQ ID NO: 1385994 - RNA, 19 nt, Human
cucaugaggucaggaguuc

SEQ ID NO: 1385995 - RNA, 20 nt, Human
cucaugaggucaggaguucc

SEQ ID NO: 1385996 - RNA, 23 nt, Human
cuccaaucuccuucccugugauc

SEQ ID NO: 1385997 - RNA, 20 nt, Human
cuccaucucaaaaaaaaaac

SEQ ID NO: 1385998 - RNA, 24 nt, Human
cucucaguuugaagucaguggccg

SEQ ID NO: 1385999 - RNA, 26 nt, Human
cucuggaucacacugcugggucccag

SEQ ID NO: 1386000 - RNA, 25 nt, Human
cugcaugugcuauuucccaagugcu

SEQ ID NO: 1386001 - RNA, 21 nt, Human
cuguaaucccagcuacuuggg

SEQ ID NO: 1386002 - RNA, 18 nt, Human
cuguucccauuuguuucc

SEQ ID NO: 1386003 - RNA, 19 nt, Human
cuucaggccuugacacgcc

SEQ ID NO: 1386004 - RNA, 24 nt, Human
cuuggcaaaaaaggagcucucaga

SEQ ID NO: 1386005 - RNA, 24 nt, Human
gacacagcacacgacucacacccu

SEQ ID NO: 1386006 - RNA, 23 nt, Human
gagacacagcacacgacucacac

SEQ ID NO: 1386007 - RNA, 24 nt, Human
gagcacagagagcauuuaccuccu

SEQ ID NO: 1386008 - RNA, 20 nt, Human
gaggcccugugguucuggaa

SEQ ID NO: 1386009 - RNA, 18 nt, Human
gaggugucccugagagca

SEQ ID NO: 1386010 - RNA, 22 nt, Human
gaggugucccugagagcacaga

SEQ ID NO: 1386011 - RNA, 22 nt, Human
gagugaagggaagaaguguguc

SEQ ID NO: 1386012 - RNA, 18 nt, Human
gaucacacugcugggucc

SEQ ID NO: 1386013 - RNA, 20 nt, Human
gaugagggaggcucagagaa

SEQ ID NO: 1386014 - RNA, 20 nt, Human
gaugggauucaugaugauca

SEQ ID NO: 1386015 - RNA, 20 nt, Human
gcaaaaaaggagcucucaga

SEQ ID NO: 1386016 - RNA, 20 nt, Human
gcaguuugggaguucugcag

SEQ ID NO: 1386017 - RNA, 20 nt, Human
gcaucagugguagcagcagg

SEQ ID NO: 1386018 - RNA, 23 nt, Human
gcauuccaaucccgggugacugu

SEQ ID NO: 1386019 - RNA, 24 nt, Human
gccaacauagugaaaccccgucuc

SEQ ID NO: 1386020 - RNA, 23 nt, Human
gcggcucaugaggucaggaguuc

SEQ ID NO: 1386021 - RNA, 24 nt, Human
gcucaugaggucaggaguucgaga

SEQ ID NO: 1386022 - RNA, 20 nt, Human
gcugggucccaguacccgau

SEQ ID NO: 1386023 - RNA, 20 nt, Human
ggcaugguggcaggcacugu

SEQ ID NO: 1386024 - RNA, 19 nt, Human
ggccaggugugguggcuca

SEQ ID NO: 1386025 - RNA, 23 nt, Human
ggcgggcggcucaugaggucagg

SEQ ID NO: 1386026 - RNA, 23 nt, Human
ggcugaugggcucagucauggga

SEQ ID NO: 1386027 - RNA, 23 nt, Human
gggaaucacuugaauccgggagg

SEQ ID NO: 1386028 - RNA, 18 nt, Human
gggcggaugagggaggcu

SEQ ID NO: 1386029 - RNA, 24 nt, Human
gggcggcucaugaggucaggaguu

SEQ ID NO: 1386030 - RNA, 22 nt, Human
gggugagcagagggcagggagc

SEQ ID NO: 1386031 - RNA, 26 nt, Human
gguggcucacuccugucacgucccag

SEQ ID NO: 1386032 - RNA, 22 nt, Human
gucccagcacuuugggaggcca

SEQ ID NO: 1386033 - RNA, 19 nt, Human
guccccaacacuggccuca

SEQ ID NO: 1386034 - RNA, 21 nt, Human
guccccaacacuggccucagc

SEQ ID NO: 1386035 - RNA, 20 nt, Human
gugcuauuucccaagugcuc

SEQ ID NO: 1386036 - RNA, 18 nt, Human
gugucccugagagcacag

SEQ ID NO: 1386037 - RNA, 20 nt, Human
guucccauuuguuuccugaa

SEQ ID NO: 1386038 - RNA, 19 nt, Human
guugcagugagcugagauc

SEQ ID NO: 1386039 - RNA, 21 nt, Human
guugcagugagcugagaucgc

SEQ ID NO: 1386040 - RNA, 20 nt, Human
uaaaugaaaagcagcuugga

SEQ ID NO: 1386041 - RNA, 19 nt, Human
uaccaacuguuccucagga

SEQ ID NO: 1386042 - RNA, 19 nt, Human
uaugagacuccaagaaggg

SEQ ID NO: 1386043 - RNA, 25 nt, Human
uauguaggcaaagguccccaacacu

SEQ ID NO: 1386044 - RNA, 19 nt, Human
ucaagaggaggaacucaca

SEQ ID NO: 1386045 - RNA, 24 nt, Human
ucaugaggucaggaguucgagacc

SEQ ID NO: 1386046 - RNA, 19 nt, Human
uccaaucccgggugacugu

SEQ ID NO: 1386047 - RNA, 20 nt, Human
uccaucucaaaaaaaaaacg

SEQ ID NO: 1386048 - RNA, 22 nt, Human
uccccaucuagacacaagcaga

SEQ ID NO: 1386049 - RNA, 19 nt, Human
ucccugagagcacagagag

SEQ ID NO: 1386050 - RNA, 20 nt, Human
ucccugcaugugcuauuucc

SEQ ID NO: 1386051 - RNA, 26 nt, Human
ucccugugaucucaguuccucuuccc

SEQ ID NO: 1386052 - RNA, 21 nt, Human
uccgggaggcagagguugcag

SEQ ID NO: 1386053 - RNA, 23 nt, Human
ucgcgccauugcauuccaauccc

SEQ ID NO: 1386054 - RNA, 20 nt, Human
ucuaacauguguggcucuug

SEQ ID NO: 1386055 - RNA, 19 nt, Human
ucucaguuccucuucccug

SEQ ID NO: 1386056 - RNA, 22 nt, Human
ucuccaggaccucagauuccug

SEQ ID NO: 1386057 - RNA, 24 nt, Human
ucucuacuaaaaaugcaaaaaauu

SEQ ID NO: 1386058 - RNA, 18 nt, Human
ugaauaagcacaaaauau

SEQ ID NO: 1386059 - RNA, 23 nt, Human
ugaauaagcacaaaauauaaaca

SEQ ID NO: 1386060 - RNA, 20 nt, Human
ugagacaggggaaucacuug

SEQ ID NO: 1386061 - RNA, 25 nt, Human
ugagacaggggaaucacuugaaucc

SEQ ID NO: 1386062 - RNA, 20 nt, Human
ugagauucuuggggauggga

SEQ ID NO: 1386063 - RNA, 22 nt, Human
ugagcugagaucgcgccauugc

SEQ ID NO: 1386064 - RNA, 20 nt, Human
ugauuuaccaacuguuccuc

SEQ ID NO: 1386065 - RNA, 20 nt, Human
ugcaaaaaauuagcugggca

SEQ ID NO: 1386066 - RNA, 24 nt, Human
ugcgaguggccaggugugguggcu

SEQ ID NO: 1386067 - RNA, 19 nt, Human
ugcuggagagugcgcaugg

SEQ ID NO: 1386068 - RNA, 20 nt, Human
ugcugggucccaguacccgg

SEQ ID NO: 1386069 - RNA, 22 nt, Human
uggcaaaaaaggagcucucaga

SEQ ID NO: 1386070 - RNA, 23 nt, Human
uggcaaccaguagcauauuuccu

SEQ ID NO: 1386071 - RNA, 21 nt, Human
uggcaggcacuguaaucccag

SEQ ID NO: 1386072 - RNA, 23 nt, Human
uggccaaaauccuuauacuugua

SEQ ID NO: 1386073 - RNA, 25 nt, Human
uggccaggugugguggcucacuccu

SEQ ID NO: 1386074 - RNA, 26 nt, Human
uggcucacuccugucacgucccagca

SEQ ID NO: 1386075 - RNA, 18 nt, Human
uggcugaguuauuuuuug

SEQ ID NO: 1386076 - RNA, 19 nt, Human
uggcuucccggagacuccu

SEQ ID NO: 1386077 - RNA, 21 nt, Human
ugggaggccaaggcgggcggc

SEQ ID NO: 1386078 - RNA, 24 nt, Human
ugggaggccaaggcgggcggcuca

SEQ ID NO: 1386079 - RNA, 24 nt, Human
ugggaggcugagacaggggaauca

SEQ ID NO: 1386080 - RNA, 23 nt, Human
ugggagggaggggaacaccuccc

SEQ ID NO: 1386081 - RNA, 24 nt, Human
uggggaugggauucaugaugauca

SEQ ID NO: 1386082 - RNA, 20 nt, Human
uggggcaggagacccuacug

SEQ ID NO: 1386083 - RNA, 24 nt, Human
uggggcaggagacccuacugcaaa

SEQ ID NO: 1386084 - RNA, 23 nt, Human
ugggugagcagagggcagggagc

SEQ ID NO: 1386085 - RNA, 19 nt, Human
ugguaucaccuccaaucuc

SEQ ID NO: 1386086 - RNA, 23 nt, Human
ugguggcaggcacuguaauccca

SEQ ID NO: 1386087 - RNA, 24 nt, Human
ugguggcaggcacuguaaucccag

SEQ ID NO: 1386088 - RNA, 18 nt, Human
ugguucuggaagaugagg

SEQ ID NO: 1386089 - RNA, 19 nt, Human
ugucccugagagcacagag

SEQ ID NO: 1386090 - RNA, 21 nt, Human
ugucuggagcagaccucagga

SEQ ID NO: 1386091 - RNA, 20 nt, Human
ugucuuguacaaaccccucc

SEQ ID NO: 1386092 - RNA, 18 nt, Human
uguggcucuuggaaacag

SEQ ID NO: 1386093 - RNA, 18 nt, Human
uuagcugggcaugguggc

SEQ ID NO: 1386094 - RNA, 20 nt, Human
uucaaggaaaggacaauacc

SEQ ID NO: 1386095 - RNA, 21 nt, Human
uuccucaacccccuggggcag

SEQ ID NO: 1386096 - RNA, 22 nt, Human
uuccugaaggccuucagcaucc

SEQ ID NO: 1386097 - RNA, 21 nt, Human
uuccuguggcuaccacugucc

SEQ ID NO: 1386098 - RNA, 24 nt, Human
uugaauccgggaggcagagguugc

SEQ ID NO: 1386099 - RNA, 19 nt, Human
uugcagugagcugagaucg

SEQ ID NO: 1386100 - RNA, 22 nt, Human
uugcagugagcugagaucgcgc

SEQ ID NO: 1386101 - RNA, 26 nt, Human
uuggcugguuuucagauaaaaggucu

SEQ ID NO: 1386102 - RNA, 25 nt, Human
uugggaggcugagacaggggaauca

SEQ ID NO: 1386103 - RNA, 21 nt, Human
uuucuggcacuucuccuuguu

SEQ ID NO: 1386104 - RNA, 19 nt, Human
aaagcugccccaaacauac

SEQ ID NO: 1386105 - RNA, 23 nt, Human
aagucagaacauggcacaaaaua

SEQ ID NO: 1386106 - RNA, 22 nt, Human
acaaagcugccccaaacauacu

SEQ ID NO: 1386107 - RNA, 24 nt, Human
acacaucauuuccccuguaacacu

SEQ ID NO: 1386108 - RNA, 21 nt, Human
agcauuuugggaggccaaggc

SEQ ID NO: 1386109 - RNA, 24 nt, Human
aggagaaaagaaucugauugcuug

SEQ ID NO: 1386110 - RNA, 21 nt, Human
aggccaaggcgggcggaucac

SEQ ID NO: 1386111 - RNA, 24 nt, Human
aggcgggcggaucacaaggucagg

SEQ ID NO: 1386112 - RNA, 20 nt, Human
aggcugggugcaguggcuca

SEQ ID NO: 1386113 - RNA, 19 nt, Human
aggugugggcccuggagac

SEQ ID NO: 1386114 - RNA, 24 nt, Human
aguggcucacgccuguaaucccag

SEQ ID NO: 1386115 - RNA, 28 nt, Human
agugugcugagguugcuucaaggcauga

SEQ ID NO: 1386116 - RNA, 24 nt, Human
caaagaacuaacauaagcucaaaa

SEQ ID NO: 1386117 - RNA, 26 nt, Human
caaggcgggcggaucacaaggucagg

SEQ ID NO: 1386118 - RNA, 24 nt, Human
cacgccuguaaucccagcauuuug

SEQ ID NO: 1386119 - RNA, 27 nt, Human
cacugcagaacucauagaacaaaauga

SEQ ID NO: 1386120 - RNA, 23 nt, Human
cagagcagaaaacaauuuaaacc

SEQ ID NO: 1386121 - RNA, 24 nt, Human
cagcauuuugggaggccaaggcgg

SEQ ID NO: 1386122 - RNA, 23 nt, Human
caggugaugagaaggauguagaa

SEQ ID NO: 1386123 - RNA, 22 nt, Human
ccuguaaucccagcauuuuggg

SEQ ID NO: 1386124 - RNA, 21 nt, Human
cucacgccuguaaucccagca

SEQ ID NO: 1386125 - RNA, 21 nt, Human
cucacgccuguaaucccagca

SEQ ID NO: 1386126 - RNA, 25 nt, Human
cucagagcagaaaacaauuuaaacc

SEQ ID NO: 1386127 - RNA, 31 nt, Human
gcccuggagacccucuccuuguagagccucu

SEQ ID NO: 1386128 - RNA, 18 nt, Human
ggcggaucacaaggucag

SEQ ID NO: 1386129 - RNA, 24 nt, Human
gggugcaguggcucacgccuguaa

SEQ ID NO: 1386130 - RNA, 18 nt, Human
gugcaguggcucacgccu

SEQ ID NO: 1386131 - RNA, 25 nt, Human
gugcugagguugcuucaaggcauga

SEQ ID NO: 1386132 - RNA, 25 nt, Human
uaaaaauacagcaaaauuacuccag

SEQ ID NO: 1386133 - RNA, 20 nt, Human
uaauguuaaaaaaugcauag

SEQ ID NO: 1386134 - RNA, 23 nt, Human
uaggaggaacaugaacuguugca

SEQ ID NO: 1386135 - RNA, 23 nt, Human
uaggcugggugcaguggcucacg

SEQ ID NO: 1386136 - RNA, 25 nt, Human
uauaguaucauggaacuucugaggg

SEQ ID NO: 1386137 - RNA, 18 nt, Human
ucacaaggucaggaagau

SEQ ID NO: 1386138 - RNA, 19 nt, Human
ucacaaggucaggaagauu

SEQ ID NO: 1386139 - RNA, 21 nt, Human
ucacgccuguaaucccagcau

SEQ ID NO: 1386140 - RNA, 19 nt, Human
ugaaaugaucaaaguagaa

SEQ ID NO: 1386141 - RNA, 24 nt, Human
ugcagaacucauagaacaaaauga

SEQ ID NO: 1386142 - RNA, 19 nt, Human
ugcuucaaggcaugacuca

SEQ ID NO: 1386143 - RNA, 25 nt, Human
uggaacuucugagucacugcagaac

SEQ ID NO: 1386144 - RNA, 22 nt, Human
uggcucacgccuguaaucccag

SEQ ID NO: 1386145 - RNA, 24 nt, Human
uggcucacgccuguaaucccagca

SEQ ID NO: 1386146 - RNA, 24 nt, Human
ugggaggccaaggcgggcggauca

SEQ ID NO: 1386147 - RNA, 20 nt, Human
ugggaggcuaagugugcuga

SEQ ID NO: 1386148 - RNA, 20 nt, Human
uuaaaagucagaacauggca

SEQ ID NO: 1386149 - RNA, 20 nt, Human
uuacucagagcagaaaacaa

SEQ ID NO: 1386150 - RNA, 21 nt, Human
uucacaaagcugccccaaaca

SEQ ID NO: 1386151 - RNA, 24 nt, Human
aaaaaaagcaacguucucuacaaa

SEQ ID NO: 1386152 - RNA, 23 nt, Human
aaaaacuggcaaguacuucugaa

SEQ ID NO: 1386153 - RNA, 20 nt, Human
aaaaagcaacguucucuaca

SEQ ID NO: 1386154 - RNA, 22 nt, Human
aaaacuaaacaacaauaaaaac

SEQ ID NO: 1386155 - RNA, 24 nt, Human
aaaacuaaacaacaauaaaaaccc

SEQ ID NO: 1386156 - RNA, 21 nt, Human
aaaauaaauaaucacaaaaac

SEQ ID NO: 1386157 - RNA, 19 nt, Human
aaacaacaauaaaaaccca

SEQ ID NO: 1386158 - RNA, 25 nt, Human
aaaccaaaacuaaacaacaauaaaa

SEQ ID NO: 1386159 - RNA, 21 nt, Human
aaacgaagacauaccccaaag

SEQ ID NO: 1386160 - RNA, 23 nt, Human
aaacuugaagacugcuauaaacc

SEQ ID NO: 1386161 - RNA, 18 nt, Human
aaagagcuagccaauuuc

SEQ ID NO: 1386162 - RNA, 24 nt, Human
aaaugaccugauuuuccuaaaaac

SEQ ID NO: 1386163 - RNA, 20 nt, Human
aagaaaaacuguuaaaucac

SEQ ID NO: 1386164 - RNA, 20 nt, Human
aagaagcagaaagcuacacg

SEQ ID NO: 1386165 - RNA, 21 nt, Human
acacaaaaauugcucacugca

SEQ ID NO: 1386166 - RNA, 18 nt, Human
accagaauaagcaaaucu

SEQ ID NO: 1386167 - RNA, 20 nt, Human
accccaaagagaaggaaaca

SEQ ID NO: 1386168 - RNA, 24 nt, Human
acuuugugaauacacuaaaaacca

SEQ ID NO: 1386169 - RNA, 27 nt, Human
agaaacgaagacauaccccaaagagaa

SEQ ID NO: 1386170 - RNA, 22 nt, Human
agaaagcuacacggaaaaaggu

SEQ ID NO: 1386171 - RNA, 22 nt, Human
agaaauguugagcuuccuacag

SEQ ID NO: 1386172 - RNA, 20 nt, Human
agaagaaaacaguagccaag

SEQ ID NO: 1386173 - RNA, 21 nt, Human
agaagcgaaggacggcggagc

SEQ ID NO: 1386174 - RNA, 23 nt, Human
agaauaagcaaaucuacagagag

SEQ ID NO: 1386175 - RNA, 23 nt, Human
agcuacggggaagcgaagaggaa

SEQ ID NO: 1386176 - RNA, 18 nt, Human
agggcugugagaaaacgg

SEQ ID NO: 1386177 - RNA, 27 nt, Human
aggggcucggggauggggugggcacug

SEQ ID NO: 1386178 - RNA, 21 nt, Human
agucaguguuccgcagacaga

SEQ ID NO: 1386179 - RNA, 22 nt, Human
agugaagauggaaaacuugaag

SEQ ID NO: 1386180 - RNA, 20 nt, Human
aucaucaucacuuuaacccg

SEQ ID NO: 1386181 - RNA, 19 nt, Human
augaaauaccaaagacuca

SEQ ID NO: 1386182 - RNA, 23 nt, Human
caaaaauuguagugcaaaagaaa

SEQ ID NO: 1386183 - RNA, 20 nt, Human
caaaacacagcagucacaca

SEQ ID NO: 1386184 - RNA, 22 nt, Human
caaaacaguggcuuuuacaaaa

SEQ ID NO: 1386185 - RNA, 25 nt, Human
caaaacuaaacaacaauaaaaaccc

SEQ ID NO: 1386186 - RNA, 19 nt, Human
caaaagaagcgaaggacgg

SEQ ID NO: 1386187 - RNA, 21 nt, Human
caaaagaagcgaaggacggcg

SEQ ID NO: 1386188 - RNA, 22 nt, Human
caaaccaaaacuaaacaacaau

SEQ ID NO: 1386189 - RNA, 18 nt, Human
caaaugaagagaacacaa

SEQ ID NO: 1386190 - RNA, 21 nt, Human
caacaauaaaaacccaaugaa

SEQ ID NO: 1386191 - RNA, 18 nt, Human
caauuccuuugaacucug

SEQ ID NO: 1386192 - RNA, 23 nt, Human
cacaagaaaaacuguuaaaucac

SEQ ID NO: 1386193 - RNA, 24 nt, Human
cacaagaaaaacuguuaaaucacc

SEQ ID NO: 1386194 - RNA, 21 nt, Human
cacacagaaucucagagaaau

SEQ ID NO: 1386195 - RNA, 22 nt, Human
cacuauauaaucaauuagggaa

SEQ ID NO: 1386196 - RNA, 19 nt, Human
cagaaagaugacgucacug

SEQ ID NO: 1386197 - RNA, 26 nt, Human
cagcaaaagaagcgaaggacggcgga

SEQ ID NO: 1386198 - RNA, 18 nt, Human
cagcagucacacaguauu

SEQ ID NO: 1386199 - RNA, 20 nt, Human
cagcccagcaaaagaagcga

SEQ ID NO: 1386200 - RNA, 20 nt, Human
cagugguggaaaagccagag

SEQ ID NO: 1386201 - RNA, 25 nt, Human
cauaccccaaagagaaggaaacaag

SEQ ID NO: 1386202 - RNA, 20 nt, Human
caucagggaaguccauuugu

SEQ ID NO: 1386203 - RNA, 18 nt, Human
ccauuuauaugaaaugac

SEQ ID NO: 1386204 - RNA, 23 nt, Human
ccgaaggagcagcagcccagcaa

SEQ ID NO: 1386205 - RNA, 22 nt, Human
ccgcagacagacugggcuggcg

SEQ ID NO: 1386206 - RNA, 22 nt, Human
ccuaaagcacauuuccuuuuca

SEQ ID NO: 1386207 - RNA, 21 nt, Human
cgagaacccacgaaccugcgc

SEQ ID NO: 1386208 - RNA, 22 nt, Human
cgagaacccacgaaccugcgcu

SEQ ID NO: 1386209 - RNA, 24 nt, Human
cgagaacccacgaaccugcgcuau

SEQ ID NO: 1386210 - RNA, 22 nt, Human
cgcuauggaggccucucuagga

SEQ ID NO: 1386211 - RNA, 21 nt, Human
cggcaaaugggggcagggcca

SEQ ID NO: 1386212 - RNA, 18 nt, Human
cguaacaaaccaaaacua

SEQ ID NO: 1386213 - RNA, 23 nt, Human
cuccaauauuccagcucuguguc

SEQ ID NO: 1386214 - RNA, 20 nt, Human
cugcucaaggguacaggguu

SEQ ID NO: 1386215 - RNA, 19 nt, Human
gaaaaacuguuaaaucacc

SEQ ID NO: 1386216 - RNA, 19 nt, Human
gaaaacuugaagacugcua

SEQ ID NO: 1386217 - RNA, 18 nt, Human
gaagacauaccccaaaga

SEQ ID NO: 1386218 - RNA, 21 nt, Human
gaagauggaaaacuugaagac

SEQ ID NO: 1386219 - RNA, 19 nt, Human
gaagcagaaagcuacacgg

SEQ ID NO: 1386220 - RNA, 24 nt, Human
gagaaaaugagaggugaccgguac

SEQ ID NO: 1386221 - RNA, 19 nt, Human
gaggaguguuuuauacccc

SEQ ID NO: 1386222 - RNA, 25 nt, Human
gaggcucuuccaaaccaaaucguac

SEQ ID NO: 1386223 - RNA, 20 nt, Human
gauggaaaacuugaagacug

SEQ ID NO: 1386224 - RNA, 21 nt, Human
gauggaaaacuugaagacugc

SEQ ID NO: 1386225 - RNA, 21 nt, Human
gcaaaagaaaagaaaucuaaa

SEQ ID NO: 1386226 - RNA, 20 nt, Human
gcgccggcaaaugggggcag

SEQ ID NO: 1386227 - RNA, 19 nt, Human
ggaaaaagguccgcgagaa

SEQ ID NO: 1386228 - RNA, 24 nt, Human
ggaaacaggaaugccgggaagaaa

SEQ ID NO: 1386229 - RNA, 26 nt, Human
ggcccaauuccuuugaacucugucuu

SEQ ID NO: 1386230 - RNA, 22 nt, Human
gggccggagcccaacggaguca

SEQ ID NO: 1386231 - RNA, 22 nt, Human
gggcgccggcaaaugggggcag

SEQ ID NO: 1386232 - RNA, 20 nt, Human
ggggauggggugggcacugg

SEQ ID NO: 1386233 - RNA, 20 nt, Human
uaaaaugccuacaaguacaa

SEQ ID NO: 1386234 - RNA, 19 nt, Human
uaaacagaguuugaaucag

SEQ ID NO: 1386235 - RNA, 21 nt, Human
uaaaccagaaacuacaaaaca

SEQ ID NO: 1386236 - RNA, 20 nt, Human
uaaauaaucacaaaaaccac

SEQ ID NO: 1386237 - RNA, 18 nt, Human
uaacaaaccaaaacuaaa

SEQ ID NO: 1386238 - RNA, 21 nt, Human
uaacaaaccaaaacuaaacaa

SEQ ID NO: 1386239 - RNA, 23 nt, Human
uaagaaacgaagacauaccccaa

SEQ ID NO: 1386240 - RNA, 18 nt, Human
uaagcaaaucuacagaga

SEQ ID NO: 1386241 - RNA, 24 nt, Human
uacacuaaaaaccacuaaauugua

SEQ ID NO: 1386242 - RNA, 21 nt, Human
uacaguaaguugagccuguua

SEQ ID NO: 1386243 - RNA, 20 nt, Human
uacagugaagauggaaaacu

SEQ ID NO: 1386244 - RNA, 26 nt, Human
uaccccaaacuccaauauuccagcuc

SEQ ID NO: 1386245 - RNA, 21 nt, Human
uaccuguacaauccaaaaaaa

SEQ ID NO: 1386246 - RNA, 24 nt, Human
uacuauaauucaugcugcaaaaca

SEQ ID NO: 1386247 - RNA, 19 nt, Human
uaguaugaaauaaacagag

SEQ ID NO: 1386248 - RNA, 21 nt, Human
uagugguugccaggggcucgg

SEQ ID NO: 1386249 - RNA, 22 nt, Human
uauaugaaauaccaaagacuca

SEQ ID NO: 1386250 - RNA, 23 nt, Human
uaucaacucuguauccucauccu

SEQ ID NO: 1386251 - RNA, 24 nt, Human
ucauuagagagcagagucaguguu

SEQ ID NO: 1386252 - RNA, 18 nt, Human
ucugaagcagagccacuu

SEQ ID NO: 1386253 - RNA, 19 nt, Human
ucugacaaagaauuucuga

SEQ ID NO: 1386254 - RNA, 22 nt, Human
ucugauggaaggagcuuguuuc

SEQ ID NO: 1386255 - RNA, 22 nt, Human
ucuuaugacucaugccuaaagc

SEQ ID NO: 1386256 - RNA, 20 nt, Human
ugaaauaccaaagacucauu

SEQ ID NO: 1386257 - RNA, 20 nt, Human
ugacugcucaaggguacagg

SEQ ID NO: 1386258 - RNA, 20 nt, Human
ugagaaaacggaaacaggaa

SEQ ID NO: 1386259 - RNA, 25 nt, Human
ugcauacaguuauucccuuuuuaca

SEQ ID NO: 1386260 - RNA, 21 nt, Human
ugccuacaaguacaauggcau

SEQ ID NO: 1386261 - RNA, 18 nt, Human
ugcuauaaaccagaaacu

SEQ ID NO: 1386262 - RNA, 20 nt, Human
uggaaaacuugaagacugcu

SEQ ID NO: 1386263 - RNA, 21 nt, Human
uggaggccucucuaggagggc

SEQ ID NO: 1386264 - RNA, 22 nt, Human
uggcaaguacuucugaagcaga

SEQ ID NO: 1386265 - RNA, 18 nt, Human
uggcuaaugacaauuuuc

SEQ ID NO: 1386266 - RNA, 22 nt, Human
uguucugacaaagaauuucuga

SEQ ID NO: 1386267 - RNA, 24 nt, Human
uuagggaaauuuuuacagacaaau

SEQ ID NO: 1386268 - RNA, 21 nt, Human
uugagcuuccuacagcucucu

SEQ ID NO: 1386269 - RNA, 22 nt, Human
uuuccaaaaggauuccaaaaau

SEQ ID NO: 1386270 - RNA, 23 nt, Human
uuuuacaaaagauguggauuugu

SEQ ID NO: 1386271 - RNA, 19 nt, Human
caggucaagugaauagcga

SEQ ID NO: 1386272 - RNA, 22 nt, Human
ccauaaguuuuugcuucugcag

SEQ ID NO: 1386273 - RNA, 20 nt, Human
gguucuccaggucaagugaa

SEQ ID NO: 1386274 - RNA, 22 nt, Human
uaaguuuuugcuucugcaguuu

SEQ ID NO: 1386275 - RNA, 19 nt, Human
uaccucaggcugcuuaggg

SEQ ID NO: 1386276 - RNA, 19 nt, Human
uaucuuuuucuucugggca

SEQ ID NO: 1386277 - RNA, 25 nt, Human
ucuucugggcaaccuccucuucugg

SEQ ID NO: 1386278 - RNA, 21 nt, Human
ugcuucugcaguuucuucugg

SEQ ID NO: 1386279 - RNA, 23 nt, Human
uucuucugggcaaccuccucuuc

SEQ ID NO: 1386280 - RNA, 23 nt, Human
uuuuuuuuuuuuuuuuuuccuuu

SEQ ID NO: 1386281 - RNA, 24 nt, Human
uuuuuuuuuuuuuuuuuuccuuuu

SEQ ID NO: 1386282 - RNA, 25 nt, Human
uuuuuuuuuuuuuuuuuuuuccuuu

SEQ ID NO: 1386283 - RNA, 25 nt, Human
uuuuuuuuuuuuuuuuuuuuuccuu

SEQ ID NO: 1386284 - RNA, 30 nt, Human; identical to SEQ ID NO: 345631

SEQ ID NO: 1386285 - RNA, 23 nt, Human
aaaaaguucccuuaucccguuca

SEQ ID NO: 1386286 - RNA, 21 nt, Human
aaacucuguuucuacaaaaaa

SEQ ID NO: 1386287 - RNA, 21 nt, Human
aaaguucccuuaucccguuca

SEQ ID NO: 1386288 - RNA, 18 nt, Human
aacauggugaaacucugu

SEQ ID NO: 1386289 - RNA, 21 nt, Human
aacauggugaaacucuguuuc

SEQ ID NO: 1386290 - RNA, 23 nt, Human
aaccguaggacaagggaagcccc

SEQ ID NO: 1386291 - RNA, 18 nt, Human
aauugcuugaacccguga

SEQ ID NO: 1386292 - RNA, 25 nt, Human
agacaggcaggcuauggccucgugc

SEQ ID NO: 1386293 - RNA, 18 nt, Human
agagguugcagugagccg

SEQ ID NO: 1386294 - RNA, 23 nt, Human
agagguugcagugagccgagauc

SEQ ID NO: 1386295 - RNA, 24 nt, Human
agagguugcagugagccgagauca

SEQ ID NO: 1386296 - RNA, 24 nt, Human
agcacuuugggaggccgaggaggg

SEQ ID NO: 1386297 - RNA, 19 nt, Human
agcauuauuuauucuugcu

SEQ ID NO: 1386298 - RNA, 22 nt, Human
agccuaagcaacauggugaaac

SEQ ID NO: 1386299 - RNA, 24 nt, Human
agccugggcgacagagccagacuc

SEQ ID NO: 1386300 - RNA, 20 nt, Human
agcuugggaggcugaggcag

SEQ ID NO: 1386301 - RNA, 18 nt, Human
aggagggaggaucacuug

SEQ ID NO: 1386302 - RNA, 24 nt, Human
aggaucacuugaggccaggaguuu

SEQ ID NO: 1386303 - RNA, 21 nt, Human
aggcagagguugcagugagcc

SEQ ID NO: 1386304 - RNA, 24 nt, Human
aggcagagguugcagugagccgag

SEQ ID NO: 1386305 - RNA, 24 nt, Human
aggcaggagaauugcuugaacccg

SEQ ID NO: 1386306 - RNA, 21 nt, Human
aggcugaggcaggagaauugc

SEQ ID NO: 1386307 - RNA, 24 nt, Human
aggcugaggcaggagaauugcuug

SEQ ID NO: 1386308 - RNA, 21 nt, Human
agucaggcauaguggugaagc

SEQ ID NO: 1386309 - RNA, 20 nt, Human
aucacuugaggccaggaguu

SEQ ID NO: 1386310 - RNA, 24 nt, Human
aucaugccauugcgcuccagccug

SEQ ID NO: 1386311 - RNA, 24 nt, Human
auugcgcuccagccugggcgacag

SEQ ID NO: 1386312 - RNA, 24 nt, Human
caacauggugaaacucuguuucua

SEQ ID NO: 1386313 - RNA, 24 nt, Human
cacaccccacaacaguguuugcug

SEQ ID NO: 1386314 - RNA, 23 nt, Human
cagcacuuugggaggccgaggag

SEQ ID NO: 1386315 - RNA, 24 nt, Human
cagcacuuugggaggccgaggagg

SEQ ID NO: 1386316 - RNA, 19 nt, Human
cauugcgcuccagccuggg

SEQ ID NO: 1386317 - RNA, 21 nt, Human
cauugcgcuccagccugggcg

SEQ ID NO: 1386318 - RNA, 22 nt, Human
cauugcgcuccagccugggcga

SEQ ID NO: 1386319 - RNA, 24 nt, Human
cauugcgcuccagccugggcgaca

SEQ ID NO: 1386320 - RNA, 20 nt, Human
ccauugcgcuccagccuggg

SEQ ID NO: 1386321 - RNA, 21 nt, Human
ccauugcgcuccagccugggc

SEQ ID NO: 1386322 - RNA, 22 nt, Human
ccauugcgcuccagccugggcg

SEQ ID NO: 1386323 - RNA, 24 nt, Human
ccauugcgcuccagccugggcgac

SEQ ID NO: 1386324 - RNA, 22 nt, Human
ccccacaacaguguuugcugcc

SEQ ID NO: 1386325 - RNA, 23 nt, Human
ccccacaacaguguuugcugccc

SEQ ID NO: 1386326 - RNA, 20 nt, Human
ccuaagcaacauggugaaac

SEQ ID NO: 1386327 - RNA, 18 nt, Human
ccucuaggcggaccaugc

SEQ ID NO: 1386328 - RNA, 18 nt, Human
ccucuaggcggaccaugc

SEQ ID NO: 1386329 - RNA, 26 nt, Human
ccugucacaccccacaacaguguuug

SEQ ID NO: 1386330 - RNA, 24 nt, Human
cuggcggugccuucugcucuuuuc

SEQ ID NO: 1386331 - RNA, 23 nt, Human
cugggacugaucaaacauggaga

SEQ ID NO: 1386332 - RNA, 24 nt, Human
gaucacuugaggccaggaguuuga

SEQ ID NO: 1386333 - RNA, 20 nt, Human
gcaacauggugaaacucugu

SEQ ID NO: 1386334 - RNA, 22 nt, Human
gccauugcgcuccagccugggc

SEQ ID NO: 1386335 - RNA, 24 nt, Human
gccauugcgcuccagccugggcga

SEQ ID NO: 1386336 - RNA, 19 nt, Human
gccuguaaucccagcacuu

SEQ ID NO: 1386337 - RNA, 24 nt, Human
gcgcuccagccugggcgacagagc

SEQ ID NO: 1386338 - RNA, 19 nt, Human
ggaucacuugaggccagga

SEQ ID NO: 1386339 - RNA, 22 nt, Human
ggaucacuugaggccaggaguu

SEQ ID NO: 1386340 - RNA, 19 nt, Human
ggccaggaguuugagacca

SEQ ID NO: 1386341 - RNA, 18 nt, Human
ggccgaggagggaggauc

SEQ ID NO: 1386342 - RNA, 23 nt, Human
ggcgacagagccagacucucuuu

SEQ ID NO: 1386343 - RNA, 18 nt, Human
gggcaugcgaugggggug

SEQ ID NO: 1386344 - RNA, 24 nt, Human
ggugccuguaaucccagcacuuug

SEQ ID NO: 1386345 - RNA, 19 nt, Human
guaggacaagggaagccuu

SEQ ID NO: 1386346 - RNA, 20 nt, Human
gugaggcagagguugcagug

SEQ ID NO: 1386347 - RNA, 23 nt, Human
gugaggcagagguugcagugagc

SEQ ID NO: 1386348 - RNA, 24 nt, Human
guugcagugagccgagaucaugcc

SEQ ID NO: 1386349 - RNA, 23 nt, Human
ucacuugaggccaggaguuugag

SEQ ID NO: 1386350 - RNA, 23 nt, Human
ucaugccauugcgcuccagccug

SEQ ID NO: 1386351 - RNA, 24 nt, Human
uccagccugggcgacagagccaga

SEQ ID NO: 1386352 - RNA, 23 nt, Human
ucggugccuguaaucccagcacu

SEQ ID NO: 1386353 - RNA, 20 nt, Human
ucugcucuuuuccgagcucu

SEQ ID NO: 1386354 - RNA, 23 nt, Human
ucugcucuuuuccgagcucuucu

SEQ ID NO: 1386355 - RNA, 21 nt, Human
ucuugcuuuguccccaaccgu

SEQ ID NO: 1386356 - RNA, 24 nt, Human
ugaaagcuugggaggcugaggcag

SEQ ID NO: 1386357 - RNA, 22 nt, Human
ugagccgagaucaugccauugc

SEQ ID NO: 1386358 - RNA, 23 nt, Human
ugaggcagagguugcagugagcc

SEQ ID NO: 1386359 - RNA, 24 nt, Human
ugaggcaggagaauugcuugaacc

SEQ ID NO: 1386360 - RNA, 25 nt, Human
ugaggcaggagaauugcuugaaccc

SEQ ID NO: 1386361 - RNA, 22 nt, Human
ugcaagagcucccugucacacc

SEQ ID NO: 1386362 - RNA, 23 nt, Human
ugccuguaaucccagcacuuugg

SEQ ID NO: 1386363 - RNA, 23 nt, Human
ugccuguaaucccagcacuuugg

SEQ ID NO: 1386364 - RNA, 24 nt, Human
ugccuguaaucccagcacuuuggg

SEQ ID NO: 1386365 - RNA, 22 nt, Human
ugcgcuccagccugggcgacag

SEQ ID NO: 1386366 - RNA, 24 nt, Human
ugcgcuccagccugggcgacagag

SEQ ID NO: 1386367 - RNA, 24 nt, Human
uggcugcaagagcucccugucaca

SEQ ID NO: 1386368 - RNA, 18 nt, Human
ugggaggccgaggaggga

SEQ ID NO: 1386369 - RNA, 24 nt, Human
ugggaggccgaggagggaggauca

SEQ ID NO: 1386370 - RNA, 19 nt, Human
ugggaggcugaggcaggag

SEQ ID NO: 1386371 - RNA, 22 nt, Human
ugggaggcugaggcaggagaau

SEQ ID NO: 1386372 - RNA, 22 nt, Human
uuagcauuauuuauucuugcuu

SEQ ID NO: 1386373 - RNA, 24 nt, Human
uucucggugccuguaaucccagca

SEQ ID NO: 1386374 - RNA, 19 nt, Human
uucuuccaugcccagcugc

SEQ ID NO: 1386375 - RNA, 22 nt, Human
uugaggccaggaguuugagacc

SEQ ID NO: 1386376 - RNA, 20 nt, Human
uugcagugagccgagaucau

SEQ ID NO: 1386377 - RNA, 21 nt, Human
uugcagugagccgagaucaug

SEQ ID NO: 1386378 - RNA, 18 nt, Human
uugcuugaacccgugagg

SEQ ID NO: 1386379 - RNA, 19 nt, Human
uugcuuuguccccaaccgu

SEQ ID NO: 1386380 - RNA, 25 nt, Human
uugggaggccgaggagggaggauca

SEQ ID NO: 1386381 - RNA, 23 nt, Human
uugggaggcugaggcaggagaau

SEQ ID NO: 1386382 - RNA, 20 nt, Human
uuuuuuuuuuucagaccuca

SEQ ID NO: 1386383 - RNA, 22 nt, Human
uuuuuuuuuuuuuuuuuuucag

SEQ ID NO: 1386384 - RNA, 23 nt, Human
aacccaguccuccucguccucca

SEQ ID NO: 1386385 - RNA, 23 nt, Human
acguguccugccaguagcuguug

SEQ ID NO: 1386386 - RNA, 22 nt, Human
acuuccacuugauuuaaaaguc

SEQ ID NO: 1386387 - RNA, 20 nt, Human
agcuguagaugccgagccgg

SEQ ID NO: 1386388 - RNA, 19 nt, Human
caaaggccuuuuauucauu

SEQ ID NO: 1386389 - RNA, 19 nt, Human
cauggaaacagugcucugc

SEQ ID NO: 1386390 - RNA, 24 nt, Human
ccaauaaaagcuaaaguuccuucu

SEQ ID NO: 1386391 - RNA, 19 nt, Human
ccaggccgcguucccuggg

SEQ ID NO: 1386392 - RNA, 19 nt, Human
cccgcggacccucagccgg

SEQ ID NO: 1386393 - RNA, 19 nt, Human
cccugggucccgcggaccc

SEQ ID NO: 1386394 - RNA, 20 nt, Human
cccugggucccgcggacccu

SEQ ID NO: 1386395 - RNA, 23 nt, Human
cuccaggccgcguucccuggguc

SEQ ID NO: 1386396 - RNA, 23 nt, Human
cuuuuuuuuucacaugaauaggu

SEQ ID NO: 1386397 - RNA, 20 nt, Human
uaaaauguggugucuucauu

SEQ ID NO: 1386398 - RNA, 26 nt, Human
ucaaaggccuuuuauucauuaacuga

SEQ ID NO: 1386399 - RNA, 22 nt, Human
ucgucuguccuggacugacuga

SEQ ID NO: 1386400 - RNA, 18 nt, Human
ucugcagugagccucucu

SEQ ID NO: 1386401 - RNA, 19 nt, Human
ugaauaggugaacuguguc

SEQ ID NO: 1386402 - RNA, 21 nt, Human
uguccuggacugacugaagaa

SEQ ID NO: 1386403 - RNA, 22 nt, Human
uguggugaaccaauaaaagcua

SEQ ID NO: 1386404 - RNA, 20 nt, Human
uuaaaagucauguuugauag

SEQ ID NO: 1386405 - RNA, 21 nt, Human
uuauucauuaacugaacaauc

SEQ ID NO: 1386406 - RNA, 25 nt, Human
uugccaguuuguuuaagacagguau

SEQ ID NO: 1386407 - RNA, 19 nt, Human
uuuuuuuuuuuuuaaggga

SEQ ID NO: 1386408 - RNA, 24 nt, Human
uuuuuuuuuuuuuuuuuuuaaggg

SEQ ID NO: 1386409 - RNA, 19 nt, Human
cuaugcuguaucucucccu

SEQ ID NO: 1386410 - RNA, 26 nt, Human
cuguaucucucccucagcaauucaua

SEQ ID NO: 1386411 - RNA, 19 nt, Human
ucaucugaaaauuuggcgu

SEQ ID NO: 1386412 - RNA, 19 nt, Human
uucuaugcuguaucucucc

SEQ ID NO: 1386413 - RNA, 25 nt, Human
aaaagccucccaccuguucucccag

SEQ ID NO: 1386414 - RNA, 18 nt, Human
aacagcuucccuaagugu

SEQ ID NO: 1386415 - RNA, 26 nt, Human
aacauacacacgcacaaacuugcaca

SEQ ID NO: 1386416 - RNA, 21 nt, Human
aagaacuagaacauaauggaa

SEQ ID NO: 1386417 - RNA, 23 nt, Human
aagcaggaacgcugcaaggucua

SEQ ID NO: 1386418 - RNA, 29 nt, Human
acauacacacgcacaaacuugcacaugca

SEQ ID NO: 1386419 - RNA, 22 nt, Human
accucauucugcccccaaccag

SEQ ID NO: 1386420 - RNA, 19 nt, Human
agaauggaaggaggguagg

SEQ ID NO: 1386421 - RNA, 21 nt, Human
agagaugggcuccgggcuucu

SEQ ID NO: 1386422 - RNA, 18 nt, Human
aggcaggugaacuccagg

SEQ ID NO: 1386423 - RNA, 19 nt, Human
aggcaggugaacuccagga

SEQ ID NO: 1386424 - RNA, 20 nt, Human
agggaggggaacgcagucug

SEQ ID NO: 1386425 - RNA, 21 nt, Human
aucaugggccguagcugaagu

SEQ ID NO: 1386426 - RNA, 24 nt, Human
aucucauucucccuagguauccaa

SEQ ID NO: 1386427 - RNA, 31 nt, Human
auggaacacugcuguggaaaaaagauaccag

SEQ ID NO: 1386428 - RNA, 22 nt, Human
caaggauuuccuugagaagcuc

SEQ ID NO: 1386429 - RNA, 19 nt, Human
caaucauucaaucaaccag

SEQ ID NO: 1386430 - RNA, 22 nt, Human
cacagggcuggcuggagaugcc

SEQ ID NO: 1386431 - RNA, 22 nt, Human
cacauaaaucauuucccaaauc

SEQ ID NO: 1386432 - RNA, 26 nt, Human
cacccacaaugaguuccacaaucauu

SEQ ID NO: 1386433 - RNA, 21 nt, Human
cacccagaucccuccaggagu

SEQ ID NO: 1386434 - RNA, 22 nt, Human
cagcuuccuggaugcacaggga

SEQ ID NO: 1386435 - RNA, 19 nt, Human
caggaauucucugguccag

SEQ ID NO: 1386436 - RNA, 18 nt, Human
cauacacacgcacaaacu

SEQ ID NO: 1386437 - RNA, 24 nt, Human
caucaugggccguagcugaagugg

SEQ ID NO: 1386438 - RNA, 25 nt, Human
ccacaggggcugcucugugcuccuc

SEQ ID NO: 1386439 - RNA, 22 nt, Human
ccacccacaaugaguuccacaa

SEQ ID NO: 1386440 - RNA, 19 nt, Human
ccacugggaagaacacaga

SEQ ID NO: 1386441 - RNA, 19 nt, Human
ccauauccuuccaucaaau

SEQ ID NO: 1386442 - RNA, 19 nt, Human
cccagaucccuccaggagu

SEQ ID NO: 1386443 - RNA, 18 nt, Human
cccccaaccagauggggg

SEQ ID NO: 1386444 - RNA, 22 nt, Human
ccuagguauccaacaucggcau

SEQ ID NO: 1386445 - RNA, 22 nt, Human
ccucccaccuguucucccagac

SEQ ID NO: 1386446 - RNA, 22 nt, Human
ccuucuccauauccuuccauca

SEQ ID NO: 1386447 - RNA, 20 nt, Human
ccuugagaagcucuaagggg

SEQ ID NO: 1386448 - RNA, 22 nt, Human
cgacgcuccaccauucucuagg

SEQ ID NO: 1386449 - RNA, 21 nt, Human
cuaacagccagggaggggaac

SEQ ID NO: 1386450 - RNA, 21 nt, Human
cuccaggaucuuacaaucuac

SEQ ID NO: 1386451 - RNA, 22 nt, Human
cucccaccuguucucccagacc

SEQ ID NO: 1386452 - RNA, 25 nt, Human
cuuccaaaacauacacacgcacaaa

SEQ ID NO: 1386453 - RNA, 21 nt, Human
gaaggaggguaggaaucccca

SEQ ID NO: 1386454 - RNA, 18 nt, Human
gcugaaaugcauagccca

SEQ ID NO: 1386455 - RNA, 18 nt, Human
gcugcagaagccacaaaa

SEQ ID NO: 1386456 - RNA, 19 nt, Human
ggagagaugggcuccgggc

SEQ ID NO: 1386457 - RNA, 23 nt, Human
ggagaugggcuuuguaaccucau

SEQ ID NO: 1386458 - RNA, 19 nt, Human
ggguaggugggaaaaagua

SEQ ID NO: 1386459 - RNA, 18 nt, Human
guuuccacacuccacagg

SEQ ID NO: 1386460 - RNA, 23 nt, Human
uaagugccuucaccugggguucu

SEQ ID NO: 1386461 - RNA, 19 nt, Human
uaagugugcggcuuauugc

SEQ ID NO: 1386462 - RNA, 20 nt, Human
uauuacaggacuucucagag

SEQ ID NO: 1386463 - RNA, 20 nt, Human
ucaagaacuagaacauaaug

SEQ ID NO: 1386464 - RNA, 19 nt, Human
ucacagggcuggcuggaga

SEQ ID NO: 1386465 - RNA, 19 nt, Human
ucaccugggguucuaugcc

SEQ ID NO: 1386466 - RNA, 24 nt, Human
ucaggguuugguguuuccacacuc

SEQ ID NO: 1386467 - RNA, 25 nt, Human
ucaguggccuucuccauauccuucc

SEQ ID NO: 1386468 - RNA, 21 nt, Human
ucaguucacccauccaugucc

SEQ ID NO: 1386469 - RNA, 19 nt, Human
ucccuaagugugcggcuua

SEQ ID NO: 1386470 - RNA, 22 nt, Human
ucucaaacuauugucucugcca

SEQ ID NO: 1386471 - RNA, 20 nt, Human
ucuccauauccuuccaucaa

SEQ ID NO: 1386472 - RNA, 27 nt, Human
ucuccuaugaaaggagguguuuaaggc

SEQ ID NO: 1386473 - RNA, 19 nt, Human
ucugcccccaaccagaugg

SEQ ID NO: 1386474 - RNA, 23 nt, Human
ucugcugcagaagccacaaaagc

SEQ ID NO: 1386475 - RNA, 20 nt, Human
ucuuuggccgccauucagcu

SEQ ID NO: 1386476 - RNA, 22 nt, Human
ugccggcacccagaucccucca

SEQ ID NO: 1386477 - RNA, 19 nt, Human
uggaugcacagggauaacc

SEQ ID NO: 1386478 - RNA, 21 nt, Human
ugggagagaugggcuccgggc

SEQ ID NO: 1386479 - RNA, 22 nt, Human
uguaaaagaguacccuuggcug

SEQ ID NO: 1386480 - RNA, 23 nt, Human
uguacccacugggaagaacacag

SEQ ID NO: 1386481 - RNA, 21 nt, Human
uuaugcuuuaagugcuuuggg

SEQ ID NO: 1386482 - RNA, 21 nt, Human
uucagggacuaaucacccucu

SEQ ID NO: 1386483 - RNA, 19 nt, Human
uugccucacugccucuuuc

SEQ ID NO: 1386484 - RNA, 22 nt, Human
uuucaagaacuagaacauaaug

SEQ ID NO: 1386485 - RNA, 22 nt, Human
uuuccacacuccacaggggcug

SEQ ID NO: 1386486 - RNA, 23 nt, Human
accucagccuucuucccccguaa

SEQ ID NO: 1386487 - RNA, 21 nt, Human
agagaaccucaaagacucagg

SEQ ID NO: 1386488 - RNA, 28 nt, Human
auuaguggugugugugugugugugugug

SEQ ID NO: 1386489 - RNA, 24 nt, Human
caacuccacaggcugacaguucug

SEQ ID NO: 1386490 - RNA, 21 nt, Human
ccugugagaagugucauguuu

SEQ ID NO: 1386491 - RNA, 22 nt, Human
cguaaucucccuugaagacccu

SEQ ID NO: 1386492 - RNA, 19 nt, Human
cuagaacauuugcuugacu

SEQ ID NO: 1386493 - RNA, 18 nt, Human
cucagggugauauaagaa

SEQ ID NO: 1386494 - RNA, 18 nt, Human
cugcugcugcugcugcug

SEQ ID NO: 1386495 - RNA, 19 nt, Human
cugcugcugcugcugcugc

SEQ ID NO: 1386496 - RNA, 20 nt, Human
gcccugcucucuaccucagc

SEQ ID NO: 1386497 - RNA, 19 nt, Human
gcugacaguucugcaaggc

SEQ ID NO: 1386498 - RNA, 18 nt, Human
ggaaacaacuccacaggc

SEQ ID NO: 1386499 - RNA, 23 nt, Human
ggaacucuucugaauucccauau

SEQ ID NO: 1386500 - RNA, 19 nt, Human
gugcugcugcugcugcugc

SEQ ID NO: 1386501 - RNA, 20 nt, Human
gugcugcugcugcugcugcu

SEQ ID NO: 1386502 - RNA, 21 nt, Human
guguguguguguguguacaug

SEQ ID NO: 1386503 - RNA, 20 nt, Human
gugugugugugugugugugu

SEQ ID NO: 1386504 - RNA, 20 nt, Human
uaacaggaauagagaaccuc

SEQ ID NO: 1386505 - RNA, 23 nt, Human
uaacaggaauagagaaccucaaa

SEQ ID NO: 1386506 - RNA, 23 nt, Human
uaagaaggaauugaauucccuug

SEQ ID NO: 1386507 - RNA, 22 nt, Human
uagagaaccucaaagacucagg

SEQ ID NO: 1386508 - RNA, 22 nt, Human
uaggcuccacucucagggugau

SEQ ID NO: 1386509 - RNA, 21 nt, Human
uauaagaaggaauugaauucc

SEQ ID NO: 1386510 - RNA, 24 nt, Human
ucccccguaaucucccuugaagac

SEQ ID NO: 1386511 - RNA, 22 nt, Human
ucccuugaagacccugaagggc

SEQ ID NO: 1386512 - RNA, 21 nt, Human
ucccuugcuguccauucugua

SEQ ID NO: 1386513 - RNA, 19 nt, Human
ugaagacccugaagggcua

SEQ ID NO: 1386514 - RNA, 21 nt, Human
ugacaggaagaggacaaucuc

SEQ ID NO: 1386515 - RNA, 21 nt, Human
ugcugcugcugcugcugcugc

SEQ ID NO: 1386516 - RNA, 21 nt, Human
ugcugcugcugcugcugcugc

SEQ ID NO: 1386517 - RNA, 21 nt, Human
ugcugcugcugcugcugcugc

SEQ ID NO: 1386518 - RNA, 24 nt, Human
ugcugcugcugcugcuguuacuuu

SEQ ID NO: 1386519 - RNA, 22 nt, Human
uggugugugugugugugugugu

SEQ ID NO: 1386520 - RNA, 19 nt, Human
ugugacaggaagaggacaa

SEQ ID NO: 1386521 - RNA, 19 nt, Human
uguguguguguacaugugc

SEQ ID NO: 1386522 - RNA, 19 nt, Human
uguguguguguguguacau

SEQ ID NO: 1386523 - RNA, 21 nt, Human
uguguguguguguguacaugu

SEQ ID NO: 1386524 - RNA, 18 nt, Human
ugugugugugugugugug

SEQ ID NO: 1386525 - RNA, 18 nt, Human
ugugugugugugugugug

SEQ ID NO: 1386526 - RNA, 18 nt, Human
ugugugugugugugugug

SEQ ID NO: 1386527 - RNA, 18 nt, Human
ugugugugugugugugug

SEQ ID NO: 1386528 - RNA, 18 nt, Human
ugugugugugugugugug

SEQ ID NO: 1386529 - RNA, 18 nt, Human
ugugugugugugugugug

SEQ ID NO: 1386530 - RNA, 23 nt, Human
uguguguguguguguguguacau

SEQ ID NO: 1386531 - RNA, 21 nt, Human
ugugugugugugugugugugu

SEQ ID NO: 1386532 - RNA, 21 nt, Human
ugugugugugugugugugugu

SEQ ID NO: 1386533 - RNA, 21 nt, Human
ugugugugugugugugugugu

SEQ ID NO: 1386534 - RNA, 21 nt, Human
ugugugugugugugugugugu

SEQ ID NO: 1386535 - RNA, 21 nt, Human
ugugugugugugugugugugu

SEQ ID NO: 1386536 - RNA, 21 nt, Human
ugugugugugugugugugugu

SEQ ID NO: 1386537 - RNA, 21 nt, Human
ugugugugugugugugugugu

SEQ ID NO: 1386538 - RNA, 21 nt, Human
ugugugugugugugugugugu

SEQ ID NO: 1386539 - RNA, 21 nt, Human
ugugugugugugugugugugu

SEQ ID NO: 1386540 - RNA, 22 nt, Human
ugugugugugugugugugugua

SEQ ID NO: 1386541 - RNA, 22 nt, Human
ugugugugugugugugugugug

SEQ ID NO: 1386542 - RNA, 22 nt, Human
ugugugugugugugugugugug

SEQ ID NO: 1386543 - RNA, 22 nt, Human
ugugugugugugugugugugug

SEQ ID NO: 1386544 - RNA, 22 nt, Human
ugugugugugugugugugugug

SEQ ID NO: 1386545 - RNA, 24 nt, Human
uucaagugcugcugcugcugcugc

SEQ ID NO: 1386546 - RNA, 18 nt, Human
uucccccguaaucucccu

SEQ ID NO: 1386547 - RNA, 18 nt, Human
uuuacaauauuacauuuc

SEQ ID NO: 1386548 - RNA, 19 nt, Human
aaaaaugucaaauacagaa

SEQ ID NO: 1386549 - RNA, 20 nt, Human
aaaagaggccgggcguggug

SEQ ID NO: 1386550 - RNA, 24 nt, Human
aaagaggccgggcgugguggcuca

SEQ ID NO: 1386551 - RNA, 19 nt, Human
aaagguggggggugguuca

SEQ ID NO: 1386552 - RNA, 18 nt, Human
aacauugagcaacagaga

SEQ ID NO: 1386553 - RNA, 20 nt, Human
aaccaagaaaagugcaacag

SEQ ID NO: 1386554 - RNA, 22 nt, Human
aagaggccaaaagguggggggu

SEQ ID NO: 1386555 - RNA, 23 nt, Human
aagaggccaaaagguggggggug

SEQ ID NO: 1386556 - RNA, 18 nt, Human
aaggugacaaaguagagg

SEQ ID NO: 1386557 - RNA, 22 nt, Human
aaguagggguugucaaaaaugu

SEQ ID NO: 1386558 - RNA, 25 nt, Human
aaugauaggggaagguggaggagag

SEQ ID NO: 1386559 - RNA, 23 nt, Human
acaggaagggacuguuaaccaga

SEQ ID NO: 1386560 - RNA, 19 nt, Human
acaguggugacacgaaagu

SEQ ID NO: 1386561 - RNA, 18 nt, Human
accaaaguaagggacaca

SEQ ID NO: 1386562 - RNA, 25 nt, Human
accaagaaaagugcaacaggcagau

SEQ ID NO: 1386563 - RNA, 25 nt, Human
agaaaaaaagucaaguacuagcuug

SEQ ID NO: 1386564 - RNA, 25 nt, Human
agagaaaaaaaaaauggaggucuga

SEQ ID NO: 1386565 - RNA, 26 nt, Human
agagaaaaaaaaaauggaggucugag

SEQ ID NO: 1386566 - RNA, 21 nt, Human
agagagaaaaaaaaaauggag

SEQ ID NO: 1386567 - RNA, 24 nt, Human
agaggccgggcgugguggcucacg

SEQ ID NO: 1386568 - RNA, 23 nt, Human
agauaaaaucaguaaaacuuaga

SEQ ID NO: 1386569 - RNA, 24 nt, Human
agcacuuugggaggucgagguggg

SEQ ID NO: 1386570 - RNA, 20 nt, Human
aggaauaaaugaagaggccc

SEQ ID NO: 1386571 - RNA, 28 nt, Human
auagcaaugaagaugaaagagugaugua

SEQ ID NO: 1386572 - RNA, 25 nt, Human
caaagaguacagcauuuaccaaggc

SEQ ID NO: 1386573 - RNA, 21 nt, Human
caaccaagaaaagugcaacag

SEQ ID NO: 1386574 - RNA, 24 nt, Human
cacgccuguaaucccagcacuuug

SEQ ID NO: 1386575 - RNA, 21 nt, Human
cagcacuuugggaggucgagg

SEQ ID NO: 1386576 - RNA, 24 nt, Human
cagcacuuugggaggucgaggugg

SEQ ID NO: 1386577 - RNA, 23 nt, Human
cagcuaaaaaaaaaagaggccgg

SEQ ID NO: 1386578 - RNA, 19 nt, Human
ccaaaguaagggacacagg

SEQ ID NO: 1386579 - RNA, 21 nt, Human
ccuggccaaauguggcuucug

SEQ ID NO: 1386580 - RNA, 23 nt, Human
cgccuguaaucccagcacuuugg

SEQ ID NO: 1386581 - RNA, 24 nt, Human
cgccuguaaucccagcacuuuggg

SEQ ID NO: 1386582 - RNA, 22 nt, Human
cucacgccuguaaucccagcac

SEQ ID NO: 1386583 - RNA, 24 nt, Human
cucacgccuguaaucccagcacuu

SEQ ID NO: 1386584 - RNA, 23 nt, Human
cugaaaguuccugaagucacuga

SEQ ID NO: 1386585 - RNA, 22 nt, Human
ggaauaaaugaagaggccaaaa

SEQ ID NO: 1386586 - RNA, 18 nt, Human
ggacucuacugacccuug

SEQ ID NO: 1386587 - RNA, 19 nt, Human
ggcagcuaaaaaaaaaaga

SEQ ID NO: 1386588 - RNA, 21 nt, Human
ggcucacgccuguaaucccag

SEQ ID NO: 1386589 - RNA, 19 nt, Human
gggaagguggaggagagga

SEQ ID NO: 1386590 - RNA, 24 nt, Human
gggcgugguggcucacgccuguaa

SEQ ID NO: 1386591 - RNA, 19 nt, Human
gggggugguucaggaguga

SEQ ID NO: 1386592 - RNA, 20 nt, Human
gguggaggagaggaaugagc

SEQ ID NO: 1386593 - RNA, 24 nt, Human
gguggcucacgccuguaaucccag

SEQ ID NO: 1386594 - RNA, 21 nt, Human
guaagaauauuccuucaaaag

SEQ ID NO: 1386595 - RNA, 25 nt, Human
guggagcaaaggagguuucacagag

SEQ ID NO: 1386596 - RNA, 18 nt, Human
uaaaugaagaggccaaaa

SEQ ID NO: 1386597 - RNA, 19 nt, Human
uaaaugauaggggaaggug

SEQ ID NO: 1386598 - RNA, 22 nt, Human
uaacauugagcaacagagagga

SEQ ID NO: 1386599 - RNA, 23 nt, Human
uaaggaauaaaugaagaggccaa

SEQ ID NO: 1386600 - RNA, 20 nt, Human
uaagugacauacaauagagg

SEQ ID NO: 1386601 - RNA, 21 nt, Human
uacagcauuuaccaaggcggg

SEQ ID NO: 1386602 - RNA, 21 nt, Human
uagcauacuugaugcaaagag

SEQ ID NO: 1386603 - RNA, 18 nt, Human
uaugccaaaaacuaugcu

SEQ ID NO: 1386604 - RNA, 24 nt, Human
ucaaaaagauuggcagcuaaaaaa

SEQ ID NO: 1386605 - RNA, 25 nt, Human
ucaaaaaugucaaauacagaaaaaa

SEQ ID NO: 1386606 - RNA, 20 nt, Human
uccaagaggauugacuuaau

SEQ ID NO: 1386607 - RNA, 25 nt, Human
ucugaagaaguguaagucuguuuca

SEQ ID NO: 1386608 - RNA, 19 nt, Human
ugaaagagugauguaucag

SEQ ID NO: 1386609 - RNA, 18 nt, Human
ugaagaaguguaagucug

SEQ ID NO: 1386610 - RNA, 24 nt, Human
ugaagaggccaaaagguggggggu

SEQ ID NO: 1386611 - RNA, 21 nt, Human
ugaagggagugaaaguauuug

SEQ ID NO: 1386612 - RNA, 21 nt, Human
ugaauuaaaauuacccaagcg

SEQ ID NO: 1386613 - RNA, 24 nt, Human
ugacacgaaaguggaaguuagaug

SEQ ID NO: 1386614 - RNA, 18 nt, Human
ugagccuagaaaacuuag

SEQ ID NO: 1386615 - RNA, 21 nt, Human
ugauuaagagagaaaaaaaaa

SEQ ID NO: 1386616 - RNA, 22 nt, Human
uggcucacgccuguaaucccag

SEQ ID NO: 1386617 - RNA, 24 nt, Human
uggcucacgccuguaaucccagca

SEQ ID NO: 1386618 - RNA, 20 nt, Human
ugggacaaccaagaaaaggg

SEQ ID NO: 1386619 - RNA, 19 nt, Human
ugggaggucgaggugggug

SEQ ID NO: 1386620 - RNA, 18 nt, Human
uggggggugguucaggag

SEQ ID NO: 1386621 - RNA, 24 nt, Human
uggggggugguucaggagugagca

SEQ ID NO: 1386622 - RNA, 21 nt, Human
ugguaacauugagcaacagag

SEQ ID NO: 1386623 - RNA, 24 nt, Human
ugguggcucacgccuguaauccca

SEQ ID NO: 1386624 - RNA, 24 nt, Human
uuaauaauagcaaugaagaugaaa

SEQ ID NO: 1386625 - RNA, 27 nt, Human
uuacaggaagggacuguuaaccggcgg

SEQ ID NO: 1386626 - RNA, 19 nt, Human
uuauuaauaauagcaauga

SEQ ID NO: 1386627 - RNA, 19 nt, Human
uucaccagaacauucggug

SEQ ID NO: 1386628 - RNA, 21 nt, Human
uucaccagaacauucggugga

SEQ ID NO: 1386629 - RNA, 21 nt, Human
uucauagucuuuugagucucc

SEQ ID NO: 1386630 - RNA, 18 nt, Human
uuccugcccuuaaggagc

SEQ ID NO: 1386631 - RNA, 22 nt, Human
uucuaaaauuaaccaaaguaag

SEQ ID NO: 1386632 - RNA, 23 nt, Human
uuuaaaaucaauuuauucaacaa

SEQ ID NO: 1386633 - RNA, 26 nt, Human
aaaaacagagacagaguaagaaagga

SEQ ID NO: 1386634 - RNA, 23 nt, Human
aacagccaccugggugacccccc

SEQ ID NO: 1386635 - RNA, 27 nt, Human
aaccugucuccuacaaggaccauccug

SEQ ID NO: 1386636 - RNA, 19 nt, Human
aagaagaggcucccccagg

SEQ ID NO: 1386637 - RNA, 19 nt, Human
aagcaggaacagccaccug

SEQ ID NO: 1386638 - RNA, 18 nt, Human
aagccgcagccgggcucg

SEQ ID NO: 1386639 - RNA, 19 nt, Human
aagcuccagguucuccugc

SEQ ID NO: 1386640 - RNA, 22 nt, Human
acaaacccaacacccgcagggc

SEQ ID NO: 1386641 - RNA, 18 nt, Human
acaaggaccauccugugu

SEQ ID NO: 1386642 - RNA, 21 nt, Human
accauccugugugggacccug

SEQ ID NO: 1386643 - RNA, 24 nt, Human
agccccucagccccucagccuccu

SEQ ID NO: 1386644 - RNA, 19 nt, Human
agccuccgaaagccgcagc

SEQ ID NO: 1386645 - RNA, 20 nt, Human
aggagaaaacgcguaauaaa

SEQ ID NO: 1386646 - RNA, 26 nt, Human
aggagaaaacgcguaauaaaacaaaa

SEQ ID NO: 1386647 - RNA, 21 nt, Human
agggcagcuugugcccaagag

SEQ ID NO: 1386648 - RNA, 24 nt, Human
agugagaaaacagcccagacagaa

SEQ ID NO: 1386649 - RNA, 24 nt, Human
agugagaaaacagcccagacagaa

SEQ ID NO: 1386650 - RNA, 19 nt, Human
auaaaacaaaaugcugcaa

SEQ ID NO: 1386651 - RNA, 21 nt, Human
auccugugugggacccugcca

SEQ ID NO: 1386652 - RNA, 22 nt, Human
caaaaucuaggagaaaacgcgg

SEQ ID NO: 1386653 - RNA, 19 nt, Human
caaaaugcugcaaaacaca

SEQ ID NO: 1386654 - RNA, 24 nt, Human
caaacccaacacccgcagggcuga

SEQ ID NO: 1386655 - RNA, 23 nt, Human
caaagggcagcuugugcccaaga

SEQ ID NO: 1386656 - RNA, 21 nt, Human
caagagaucauggcccagagc

SEQ ID NO: 1386657 - RNA, 18 nt, Human
caccucagcaacuuguca

SEQ ID NO: 1386658 - RNA, 21 nt, Human
caccugagcccgaaauugucc

SEQ ID NO: 1386659 - RNA, 23 nt, Human
caccugggugaccccccucccua

SEQ ID NO: 1386660 - RNA, 20 nt, Human
cacgugacgugcgguggacc

SEQ ID NO: 1386661 - RNA, 20 nt, Human
cagcaaagggcagcuugugc

SEQ ID NO: 1386662 - RNA, 19 nt, Human
cagcccagacagaaagcag

SEQ ID NO: 1386663 - RNA, 25 nt, Human
cagccccucagccccucagccuccu

SEQ ID NO: 1386664 - RNA, 19 nt, Human
cagccccucagccgccuca

SEQ ID NO: 1386665 - RNA, 20 nt, Human
caggaacagccaccugggug

SEQ ID NO: 1386666 - RNA, 22 nt, Human
caggagcccacggccucagaaa

SEQ ID NO: 1386667 - RNA, 19 nt, Human
caggcaaaggggaaauugg

SEQ ID NO: 1386668 - RNA, 25 nt, Human
cagugccaagagaucauggcccaga

SEQ ID NO: 1386669 - RNA, 19 nt, Human
caucaggcaccucagcaac

SEQ ID NO: 1386670 - RNA, 19 nt, Human
caugauccgugcccaacgc

SEQ ID NO: 1386671 - RNA, 19 nt, Human
cauggcccagagcuggcag

SEQ ID NO: 1386672 - RNA, 22 nt, Human
ccaacaaacccaacacccgcag

SEQ ID NO: 1386673 - RNA, 19 nt, Human
ccaagagaucauggcccag

SEQ ID NO: 1386674 - RNA, 22 nt, Human
ccaagagaucauggcccagagc

SEQ ID NO: 1386675 - RNA, 22 nt, Human
ccaccugggugaccccccuccc

SEQ ID NO: 1386676 - RNA, 22 nt, Human
ccagccaaggccucccggagcc

SEQ ID NO: 1386677 - RNA, 22 nt, Human
ccaggaguccugggcaggggca

SEQ ID NO: 1386678 - RNA, 22 nt, Human
ccccaacaaacccaacacccgc

SEQ ID NO: 1386679 - RNA, 19 nt, Human
cccccaggaugcaaacuca

SEQ ID NO: 1386680 - RNA, 21 nt, Human
cccucagccgccucaggcccu

SEQ ID NO: 1386681 - RNA, 29 nt, Human
cccugcaccugagcccgaaauuguccccc

SEQ ID NO: 1386682 - RNA, 23 nt, Human
ccucagcaacuugucaaaccugu

SEQ ID NO: 1386683 - RNA, 18 nt, Human
cgcccaggacgcgcccgc

SEQ ID NO: 1386684 - RNA, 18 nt, Human
cgcccccugcaccugagc

SEQ ID NO: 1386685 - RNA, 24 nt, Human
cgccugccacugacuccuggccgc

SEQ ID NO: 1386686 - RNA, 19 nt, Human
cggcagggaccggccaggc

SEQ ID NO: 1386687 - RNA, 21 nt, Human
cgggcuccagggcagccuccu

SEQ ID NO: 1386688 - RNA, 24 nt, Human
cggugucuuccaaacccaagccuc

SEQ ID NO: 1386689 - RNA, 24 nt, Human
cguaauaaaacaaaaugcugcaaa

SEQ ID NO: 1386690 - RNA, 22 nt, Human
cucagccccucagccgccucag

SEQ ID NO: 1386691 - RNA, 22 nt, Human
cucagccccucagccuccucag

SEQ ID NO: 1386692 - RNA, 20 nt, Human
cuccagguucuccugccagg

SEQ ID NO: 1386693 - RNA, 21 nt, Human
cucccggagccaucacccacc

SEQ ID NO: 1386694 - RNA, 20 nt, Human
cuccucagccccucagcccc

SEQ ID NO: 1386695 - RNA, 21 nt, Human
gaaauuguccccaacaaaccc

SEQ ID NO: 1386696 - RNA, 22 nt, Human
gcaaagggcagcuugugcccaa

SEQ ID NO: 1386697 - RNA, 24 nt, Human
gcagucagcucagcagcucucccu

SEQ ID NO: 1386698 - RNA, 23 nt, Human
gcccgcgcuggggaagcgccccc

SEQ ID NO: 1386699 - RNA, 24 nt, Human
gccgcgccugccacugacuccugg

SEQ ID NO: 1386700 - RNA, 20 nt, Human
ggaauggucuggaaaguggg

SEQ ID NO: 1386701 - RNA, 21 nt, Human
gggcagggccaguccggggga

SEQ ID NO: 1386702 - RNA, 23 nt, Human
gggcagggccaguccgggggagc

SEQ ID NO: 1386703 - RNA, 19 nt, Human
guccccaacaaacccaaca

SEQ ID NO: 1386704 - RNA, 21 nt, Human
uaaaacaaaaugcugcaaaac

SEQ ID NO: 1386705 - RNA, 18 nt, Human
uaagaaaggacaccgagc

SEQ ID NO: 1386706 - RNA, 26 nt, Human
ucagcaacuugucaaaccugucuccu

SEQ ID NO: 1386707 - RNA, 18 nt, Human
ucagccccucagccccuc

SEQ ID NO: 1386708 - RNA, 18 nt, Human
ucagccccucagccccuc

SEQ ID NO: 1386709 - RNA, 21 nt, Human
ucagccccucagccgccucag

SEQ ID NO: 1386710 - RNA, 21 nt, Human
ucagccccucagccuccucag

SEQ ID NO: 1386711 - RNA, 21 nt, Human
ucagccccucagccuccucag

SEQ ID NO: 1386712 - RNA, 21 nt, Human
ucagccgccucaggcccucag

SEQ ID NO: 1386713 - RNA, 19 nt, Human
ucagccuccucagccccuc

SEQ ID NO: 1386714 - RNA, 19 nt, Human
ucagccuccucagccccuc

SEQ ID NO: 1386715 - RNA, 21 nt, Human
ucagccuccucagccccucag

SEQ ID NO: 1386716 - RNA, 21 nt, Human
ucagccuccucagccccucag

SEQ ID NO: 1386717 - RNA, 18 nt, Human
ucagccuuucagccccuc

SEQ ID NO: 1386718 - RNA, 18 nt, Human
ucagcucagcagcucucc

SEQ ID NO: 1386719 - RNA, 21 nt, Human
ucaggcaaaggggaaauugga

SEQ ID NO: 1386720 - RNA, 19 nt, Human
ucaggcccucagccuuuca

SEQ ID NO: 1386721 - RNA, 23 nt, Human
uccaaacccaagccuccgaaagc

SEQ ID NO: 1386722 - RNA, 22 nt, Human
uccacgcugucgcgggcuucug

SEQ ID NO: 1386723 - RNA, 23 nt, Human
ucccagccaaggccucccggagc

SEQ ID NO: 1386724 - RNA, 21 nt, Human
uccccaacaaacccaacaccc

SEQ ID NO: 1386725 - RNA, 23 nt, Human
uccgugcccaacgccagcaaagg

SEQ ID NO: 1386726 - RNA, 24 nt, Human
ugaaaugggcaccgcgugcuuucc

SEQ ID NO: 1386727 - RNA, 19 nt, Human
ugccuggaauggucuggaa

SEQ ID NO: 1386728 - RNA, 23 nt, Human
ugcggugucgaugaaaugggcac

SEQ ID NO: 1386729 - RNA, 24 nt, Human
uggaauggucuggaaagugggggc

SEQ ID NO: 1386730 - RNA, 21 nt, Human
ugggacccugccaagcuccua

SEQ ID NO: 1386731 - RNA, 19 nt, Human
ugggcaggggcaccaccug

SEQ ID NO: 1386732 - RNA, 18 nt, Human
ugggugaccccccucccu

SEQ ID NO: 1386733 - RNA, 20 nt, Human
ugucccagccaaggccuccc

SEQ ID NO: 1386734 - RNA, 21 nt, Human
uguccccaacaaacccaacac

SEQ ID NO: 1386735 - RNA, 21 nt, Human
uucccgggaaucugaaagcuc

SEQ ID NO: 1386736 - RNA, 24 nt, Human
uuggauccuugccagguuuccagu

SEQ ID NO: 1386737 - RNA, 18 nt, Human
aaaaacauucuggucauc

SEQ ID NO: 1386738 - RNA, 24 nt, Human
aaaagccuuuuuauuuccuucacc

SEQ ID NO: 1386739 - RNA, 21 nt, Human
aaacauuuaagauugccuacu

SEQ ID NO: 1386740 - RNA, 20 nt, Human
aaaggaacauggugguugcg

SEQ ID NO: 1386741 - RNA, 24 nt, Human
aaccauaagcagucuucugauuca

SEQ ID NO: 1386742 - RNA, 19 nt, Human
aaccauugaaagauaauag

SEQ ID NO: 1386743 - RNA, 18 nt, Human
aagcuaccagcuucuccc

SEQ ID NO: 1386744 - RNA, 19 nt, Human
aagcuuacauuuaugcugc

SEQ ID NO: 1386745 - RNA, 21 nt, Human
aaugaaugacuaaauaugccc

SEQ ID NO: 1386746 - RNA, 23 nt, Human
acaagaaaggcacuagaaacaua

SEQ ID NO: 1386747 - RNA, 24 nt, Human
acacccucugcuguguuccaacuu

SEQ ID NO: 1386748 - RNA, 21 nt, Human
acuggagucacggcagccgcc

SEQ ID NO: 1386749 - RNA, 19 nt, Human
agcacuucggacaauuugu

SEQ ID NO: 1386750 - RNA, 22 nt, Human
agcaggcaguccccagcucucu

SEQ ID NO: 1386751 - RNA, 25 nt, Human
aggcucugacucuaauuaacaaccu

SEQ ID NO: 1386752 - RNA, 18 nt, Human
aguacaguuccaucaccu

SEQ ID NO: 1386753 - RNA, 20 nt, Human
auagaauacuuccccaaaca

SEQ ID NO: 1386754 - RNA, 21 nt, Human
auagaauacuuccccaaacau

SEQ ID NO: 1386755 - RNA, 24 nt, Human
augagcagagacuuguuuggcaag

SEQ ID NO: 1386756 - RNA, 18 nt, Human
caaaccccauucagguac

SEQ ID NO: 1386757 - RNA, 19 nt, Human
caaaguuaccaaaccuuuc

SEQ ID NO: 1386758 - RNA, 22 nt, Human
caaccagacacuuucgggcauc

SEQ ID NO: 1386759 - RNA, 24 nt, Human
caaccagacacuuucgggcauccc

SEQ ID NO: 1386760 - RNA, 24 nt, Human
cacccucugcuguguuccaacuuu

SEQ ID NO: 1386761 - RNA, 21 nt, Human
caggaaauguguacagugcau

SEQ ID NO: 1386762 - RNA, 24 nt, Human
cagguccuuuggagagaaaaaaag

SEQ ID NO: 1386763 - RNA, 24 nt, Human
cauuuucaaaacucucuuuaagaa

SEQ ID NO: 1386764 - RNA, 24 nt, Human
cauuuugaaaaauaaaguuaggaa

SEQ ID NO: 1386765 - RNA, 21 nt, Human
ccaaucuguauuuuauuacac

SEQ ID NO: 1386766 - RNA, 18 nt, Human
ccaccgcgagccucccgg

SEQ ID NO: 1386767 - RNA, 21 nt, Human
cccaagaaaauaauacgcuuu

SEQ ID NO: 1386768 - RNA, 21 nt, Human
ccccaaucgcgcucuccgacc

SEQ ID NO: 1386769 - RNA, 21 nt, Human
ccccgccgcggaaugaaaucc

SEQ ID NO: 1386770 - RNA, 19 nt, Human
ccgaccggcucccuaggcg

SEQ ID NO: 1386771 - RNA, 18 nt, Human
ccgcagccgcugccccgc

SEQ ID NO: 1386772 - RNA, 19 nt, Human
ccgccgccugccgcccgca

SEQ ID NO: 1386773 - RNA, 21 nt, Human
ccgccugccgcccgcagccgc

SEQ ID NO: 1386774 - RNA, 20 nt, Human
cgacagggcaggacacuguc

SEQ ID NO: 1386775 - RNA, 24 nt, Human
cggggcuccgcaccccaaucgcgc

SEQ ID NO: 1386776 - RNA, 21 nt, Human
cucccgaccugcccgccgccu

SEQ ID NO: 1386777 - RNA, 23 nt, Human
cucccgaccugcccgccgccugc

SEQ ID NO: 1386778 - RNA, 18 nt, Human
cuccgcaccccaaucgcg

SEQ ID NO: 1386779 - RNA, 22 nt, Human
cucggcucguucauccuguggg

SEQ ID NO: 1386780 - RNA, 23 nt, Human
cucucccaagaugcauuuuuaaa

SEQ ID NO: 1386781 - RNA, 20 nt, Human
cugauuuuacaaaacccaaa

SEQ ID NO: 1386782 - RNA, 20 nt, Human
cugcccgccgccugccgccc

SEQ ID NO: 1386783 - RNA, 25 nt, Human
gaguucuuagcacuucggacaauuu

SEQ ID NO: 1386784 - RNA, 18 nt, Human
gauuucagaaucaaaccc

SEQ ID NO: 1386785 - RNA, 20 nt, Human
gcaacagguagaaagauuuc

SEQ ID NO: 1386786 - RNA, 18 nt, Human
gcccgccgccugccgccc

SEQ ID NO: 1386787 - RNA, 22 nt, Human
ggaaagaccagaacuuaugaua

SEQ ID NO: 1386788 - RNA, 19 nt, Human
ggaaauguguacagugcau

SEQ ID NO: 1386789 - RNA, 21 nt, Human
ggcuuacagcccaaucuuugg

SEQ ID NO: 1386790 - RNA, 19 nt, Human
gggagguguuuauuuuaug

SEQ ID NO: 1386791 - RNA, 22 nt, Human
gucagcccaggccgguccuucu

SEQ ID NO: 1386792 - RNA, 20 nt, Human
gugaacaggcucugacucua

SEQ ID NO: 1386793 - RNA, 21 nt, Human
uaaaagccuuuuuauuuccuu

SEQ ID NO: 1386794 - RNA, 23 nt, Human
uaagaaaagauauucauggcugu

SEQ ID NO: 1386795 - RNA, 21 nt, Human
uaauacgcuuuauuuccagau

SEQ ID NO: 1386796 - RNA, 22 nt, Human
uacaaagauuuaaaacaaacaa

SEQ ID NO: 1386797 - RNA, 23 nt, Human
uacaaagauuuaaaacaaacaaa

SEQ ID NO: 1386798 - RNA, 18 nt, Human
uacaauacaaauaucacc

SEQ ID NO: 1386799 - RNA, 21 nt, Human
uacaaucaagacaagaaaggc

SEQ ID NO: 1386800 - RNA, 20 nt, Human
uacacacccucugcuguguu

SEQ ID NO: 1386801 - RNA, 23 nt, Human
uacagcccaaucuuuggggcaag

SEQ ID NO: 1386802 - RNA, 24 nt, Human
uaccaaaucgacgauaaaauaauu

SEQ ID NO: 1386803 - RNA, 18 nt, Human
uaccaguauacucucugg

SEQ ID NO: 1386804 - RNA, 19 nt, Human
uagacaaauuucucuccca

SEQ ID NO: 1386805 - RNA, 19 nt, Human
uaggaaauacuuagaaaau

SEQ ID NO: 1386806 - RNA, 19 nt, Human
uagguuaaauuuuucuuua

SEQ ID NO: 1386807 - RNA, 20 nt, Human
uauagaauagaauacuuccc

SEQ ID NO: 1386808 - RNA, 21 nt, Human
uaucaacagguuccuuuaaaa

SEQ ID NO: 1386809 - RNA, 20 nt, Human
uaugaacaggaaauguguac

SEQ ID NO: 1386810 - RNA, 23 nt, Human
uauguuaggaguaaaacuuagag

SEQ ID NO: 1386811 - RNA, 27 nt, Human
ucacucccgaccugcccgccgccugcc

SEQ ID NO: 1386812 - RNA, 23 nt, Human
ucauugaguaguuaaaauugaac

SEQ ID NO: 1386813 - RNA, 23 nt, Human
uccaacuuuacuguucuugaaau

SEQ ID NO: 1386814 - RNA, 23 nt, Human
ucccaaacuuaugaacaggaaau

SEQ ID NO: 1386815 - RNA, 22 nt, Human
ucccgggcugccgagcaugccc

SEQ ID NO: 1386816 - RNA, 21 nt, Human
ucuuuuuuuuugcacuuuuug

SEQ ID NO: 1386817 - RNA, 23 nt, Human
ugaacaggaaauguguacagugc

SEQ ID NO: 1386818 - RNA, 22 nt, Human
ugacucuaauuaacaaccucau

SEQ ID NO: 1386819 - RNA, 20 nt, Human
ugaggcagguucucgucuuc

SEQ ID NO: 1386820 - RNA, 19 nt, Human
ugcacuuuuugaaacacug

SEQ ID NO: 1386821 - RNA, 23 nt, Human
uggcaggucagcagucacuguuc

SEQ ID NO: 1386822 - RNA, 18 nt, Human
uggcuuacagcccaaucu

SEQ ID NO: 1386823 - RNA, 18 nt, Human
uggcuuacagcccaaucu

SEQ ID NO: 1386824 - RNA, 19 nt, Human
uguauacauauauuuauau

SEQ ID NO: 1386825 - RNA, 21 nt, Human
ugugccugaaucaugcuguua

SEQ ID NO: 1386826 - RNA, 21 nt, Human
uucaaaaaguccacacuccuu

SEQ ID NO: 1386827 - RNA, 22 nt, Human
uucaccaacaaaauugucauga

SEQ ID NO: 1386828 - RNA, 18 nt, Human
uugcugaggcagguucuc

SEQ ID NO: 1386829 - RNA, 22 nt, Human
uuuacaaaacccaaaguuacca

SEQ ID NO: 1386830 - RNA, 23 nt, Human
uuucugugucuaucauuuuuauu

SEQ ID NO: 1386831 - RNA, 21 nt, Human
aaaaaaaaagaaggagaagaa

SEQ ID NO: 1386832 - RNA, 22 nt, Human
aaaaaaucuccacccaucccac

SEQ ID NO: 1386833 - RNA, 24 nt, Human
aaaaagaaggagaagaauaaaaga

SEQ ID NO: 1386834 - RNA, 19 nt, Human
aaagaaaaagaaaaaaccc

SEQ ID NO: 1386835 - RNA, 21 nt, Human
aaaggaacaaacgccagagcg

SEQ ID NO: 1386836 - RNA, 23 nt, Human
aaauauacacuaucaugaacacg

SEQ ID NO: 1386837 - RNA, 19 nt, Human
aagaaagaaaaagaaaaaa

SEQ ID NO: 1386838 - RNA, 23 nt, Human
aagaaagaaaaagaaaaaaccca

SEQ ID NO: 1386839 - RNA, 22 nt, Human
aagaaggagaagaauaaaagaa

SEQ ID NO: 1386840 - RNA, 18 nt, Human
aaucuccacccaucccac

SEQ ID NO: 1386841 - RNA, 21 nt, Human
aaucuccacccaucccaccuc

SEQ ID NO: 1386842 - RNA, 26 nt, Human
acacuuaacacaagacaugcaauaac

SEQ ID NO: 1386843 - RNA, 21 nt, Human
acuguauuccaguucuaggca

SEQ ID NO: 1386844 - RNA, 19 nt, Human
agaaaaagaaaaaacccau

SEQ ID NO: 1386845 - RNA, 18 nt, Human
agaagaauaaaagaaaga

SEQ ID NO: 1386846 - RNA, 21 nt, Human
agaaggagaagaauaaaagaa

SEQ ID NO: 1386847 - RNA, 18 nt, Human
agcucagccucacccgca

SEQ ID NO: 1386848 - RNA, 24 nt, Human
aggcacuggccgacaacgcuccgc

SEQ ID NO: 1386849 - RNA, 19 nt, Human
auguuuugaguuuuguacc

SEQ ID NO: 1386850 - RNA, 21 nt, Human
caaaggaacaaacgccagagc

SEQ ID NO: 1386851 - RNA, 23 nt, Human
caacuucacggaaggcacuggcc

SEQ ID NO: 1386852 - RNA, 19 nt, Human
caauaucauauacaaaaca

SEQ ID NO: 1386853 - RNA, 19 nt, Human
cacuggccgacaacgcucc

SEQ ID NO: 1386854 - RNA, 25 nt, Human
caggccgcaaggcgaggggcgggga

SEQ ID NO: 1386855 - RNA, 22 nt, Human
caugcaauaacaaagcuaaauc

SEQ ID NO: 1386856 - RNA, 23 nt, Human
caugcaauaacaaagcuaaauca

SEQ ID NO: 1386857 - RNA, 20 nt, Human
cauucauuacaugacugcuc

SEQ ID NO: 1386858 - RNA, 21 nt, Human
cccaacgacccggcgagcaac

SEQ ID NO: 1386859 - RNA, 21 nt, Human
ccgccuacaggucgacagggg

SEQ ID NO: 1386860 - RNA, 23 nt, Human
ccgcgccacuccggccuugcgcc

SEQ ID NO: 1386861 - RNA, 22 nt, Human
ccuaaagugcaucuuuugaaga

SEQ ID NO: 1386862 - RNA, 24 nt, Human
ccuacacacuugaggccaccgagu

SEQ ID NO: 1386863 - RNA, 26 nt, Human
ccuccaagaccaauccgggcucccca

SEQ ID NO: 1386864 - RNA, 19 nt, Human
ccugaaucuggaggacagc

SEQ ID NO: 1386865 - RNA, 22 nt, Human
ccugcgcagccguugcuccucc

SEQ ID NO: 1386866 - RNA, 24 nt, Human
ccuugcgccauuccggccccacga

SEQ ID NO: 1386867 - RNA, 23 nt, Human
cgagcaacuucacggaaggcacu

SEQ ID NO: 1386868 - RNA, 19 nt, Human
cgcagcccgggcgcccccc

SEQ ID NO: 1386869 - RNA, 23 nt, Human
cgcccaaaggaacaaacgccaga

SEQ ID NO: 1386870 - RNA, 18 nt, Human
cgcccccccugccggccg

SEQ ID NO: 1386871 - RNA, 22 nt, Human
cgcccccccugccggccgcucg

SEQ ID NO: 1386872 - RNA, 18 nt, Human
cggccggcggcggcagcg

SEQ ID NO: 1386873 - RNA, 18 nt, Human
cgggcgcccccccugccg

SEQ ID NO: 1386874 - RNA, 23 nt, Human
cuacaggucgacagggcccaacg

SEQ ID NO: 1386875 - RNA, 24 nt, Human
cuccacccaucccaccucugaaaa

SEQ ID NO: 1386876 - RNA, 22 nt, Human
cuccccagacccaccggccuga

SEQ ID NO: 1386877 - RNA, 18 nt, Human
cucgcagcccgggcgccc

SEQ ID NO: 1386878 - RNA, 20 nt, Human
cucugaaaaaaaaagaagga

SEQ ID NO: 1386879 - RNA, 26 nt, Human
cucugaaaaaaaaagaaggagaagaa

SEQ ID NO: 1386880 - RNA, 21 nt, Human
cuggaggacagcaguccgcgu

SEQ ID NO: 1386881 - RNA, 21 nt, Human
gaaaaaaaaagaaggagaaga

SEQ ID NO: 1386882 - RNA, 18 nt, Human
gaggacagcaguccgcgu

SEQ ID NO: 1386883 - RNA, 25 nt, Human
gcaaaucuuuuagagucgaacaaaa

SEQ ID NO: 1386884 - RNA, 21 nt, Human
gcagaacaguaagauguagag

SEQ ID NO: 1386885 - RNA, 19 nt, Human
gccggcggcggcagcgcgg

SEQ ID NO: 1386886 - RNA, 25 nt, Human
ggaaggcacuggccgacaacgcucc

SEQ ID NO: 1386887 - RNA, 24 nt, Human
ggcagaacaguaagauguagagga

SEQ ID NO: 1386888 - RNA, 19 nt, Human
gggcagcagcggccggcgu

SEQ ID NO: 1386889 - RNA, 25 nt, Human
gggcagcagcggccggcgucaggcc

SEQ ID NO: 1386890 - RNA, 26 nt, Human
uaaaaaggaacuugcuaauaaagcca

SEQ ID NO: 1386891 - RNA, 23 nt, Human
uaaaauauacacuaucaugaaca

SEQ ID NO: 1386892 - RNA, 19 nt, Human
uaagaaaaaccgagcugug

SEQ ID NO: 1386893 - RNA, 19 nt, Human
uacuuugacuuuucuaguu

SEQ ID NO: 1386894 - RNA, 22 nt, Human
uauacaaaacacuuaacacaaa

SEQ ID NO: 1386895 - RNA, 22 nt, Human
ucagcacccgucgggaaagccg

SEQ ID NO: 1386896 - RNA, 25 nt, Human
ucagcacccgucgggaaagccgcgu

SEQ ID NO: 1386897 - RNA, 21 nt, Human
uccgcgugacaacagcgacuc

SEQ ID NO: 1386898 - RNA, 24 nt, Human
uccgggcuccccagacccaccggc

SEQ ID NO: 1386899 - RNA, 22 nt, Human
uccuaaagugcaucuuuugaag

SEQ ID NO: 1386900 - RNA, 22 nt, Human
ucuaggcaaaccagguuugaag

SEQ ID NO: 1386901 - RNA, 25 nt, Human
ucugaaaaaaaaagaaggagaagaa

SEQ ID NO: 1386902 - RNA, 18 nt, Human
ugaaaaaaaaagaaggag

SEQ ID NO: 1386903 - RNA, 18 nt, Human
ugaguagagccauucauu

SEQ ID NO: 1386904 - RNA, 19 nt, Human
ugccuaguaaaacugcaau

SEQ ID NO: 1386905 - RNA, 19 nt, Human
uggcaagugggacaucuuc

SEQ ID NO: 1386906 - RNA, 23 nt, Human
uguaccuacacacuugaggccac

SEQ ID NO: 1386907 - RNA, 21 nt, Human
uucaaaagguaaaaaguuggc

SEQ ID NO: 1386908 - RNA, 24 nt, Human
uucuucuaaaauaugucgcaggca

SEQ ID NO: 1386909 - RNA, 27 nt, Human
uuuaaaaaaucuccacccaucccaccu

SEQ ID NO: 1386910 - RNA, 29 nt, Human
uuuaaaaaaucuccacccaucccaccucu

SEQ ID NO: 1386911 - RNA, 18 nt, Human
uuugaguuuuguaccuac

SEQ ID NO: 1386912 - RNA, 24 nt, Human
gacuacguaaccaaaaaucaaaau

SEQ ID NO: 1386913 - RNA, 26 nt, Human
aaaaauauggaaaaaaaaaccacagc

SEQ ID NO: 1386914 - RNA, 24 nt, Human
aaaacaaaaacaaaaaaaaucaca

SEQ ID NO: 1386915 - RNA, 19 nt, Human
aaaauaauuuagucugcaa

SEQ ID NO: 1386916 - RNA, 21 nt, Human
aaacaaaaacaaaaaaaauca

SEQ ID NO: 1386917 - RNA, 18 nt, Human
aaagaaggaacagauaug

SEQ ID NO: 1386918 - RNA, 26 nt, Human
aaagggcuuuuuuuuuuauuauuauu

SEQ ID NO: 1386919 - RNA, 23 nt, Human
aagaaagccuuucuggguuggcc

SEQ ID NO: 1386920 - RNA, 23 nt, Human
aagaggaggcagaugcaccuaua

SEQ ID NO: 1386921 - RNA, 22 nt, Human
aagaguugacagggaagugaaa

SEQ ID NO: 1386922 - RNA, 20 nt, Human
acaacagaaauaagagaaaa

SEQ ID NO: 1386923 - RNA, 19 nt, Human
acacauuuaaaucuucuua

SEQ ID NO: 1386924 - RNA, 21 nt, Human
accauaaaaaggcaucauaaa

SEQ ID NO: 1386925 - RNA, 27 nt, Human
accauaaaaaggcaucauaaagaagga

SEQ ID NO: 1386926 - RNA, 21 nt, Human
agaaaugaauuauuaagucua

SEQ ID NO: 1386927 - RNA, 24 nt, Human
aggcaucauaaagaaggaacagau

SEQ ID NO: 1386928 - RNA, 21 nt, Human
aggcuuuaaaaacaaaaacaa

SEQ ID NO: 1386929 - RNA, 26 nt, Human
auaaaauuaaaaaacugaaaggucag

SEQ ID NO: 1386930 - RNA, 22 nt, Human
auagaggguaaccuaccauaca

SEQ ID NO: 1386931 - RNA, 23 nt, Human
caacagaaauaagagaaaauaaa

SEQ ID NO: 1386932 - RNA, 21 nt, Human
caccauuguaagaauuaagaa

SEQ ID NO: 1386933 - RNA, 21 nt, Human
cagauaugcgcuccauagucc

SEQ ID NO: 1386934 - RNA, 23 nt, Human
ccacagaaacuucaauucccaga

SEQ ID NO: 1386935 - RNA, 24 nt, Human
cugguuacggcucacgcuuccuuc

SEQ ID NO: 1386936 - RNA, 19 nt, Human
gaaaauaaaauguucuucc

SEQ ID NO: 1386937 - RNA, 22 nt, Human
gagcugaagaguugacagggaa

SEQ ID NO: 1386938 - RNA, 22 nt, Human
gaucuuucaauagcaacagccu

SEQ ID NO: 1386939 - RNA, 18 nt, Human
ggcaauagaucauaaaga

SEQ ID NO: 1386940 - RNA, 23 nt, Human
ggccugguuacggcucacgcuuc

SEQ ID NO: 1386941 - RNA, 23 nt, Human
uacaaaguuuaaagggcuuuuuu

SEQ ID NO: 1386942 - RNA, 18 nt, Human
uacaugcauauuaucaca

SEQ ID NO: 1386943 - RNA, 29 nt, Human
uagcaacagccuuauaaaauaauuuaguu

SEQ ID NO: 1386944 - RNA, 18 nt, Human
uagucugcaaaauucaau

SEQ ID NO: 1386945 - RNA, 18 nt, Human
uaucacauguguauuuga

SEQ ID NO: 1386946 - RNA, 28 nt, Human
uauuuacaugcauauuaucacaugugua

SEQ ID NO: 1386947 - RNA, 22 nt, Human
ucagaaccauaaaaaggcaucc

SEQ ID NO: 1386948 - RNA, 21 nt, Human
uccacagaaacuucaauuccc

SEQ ID NO: 1386949 - RNA, 25 nt, Human
ucuaaagaauauaaaaugaaagaaa

SEQ ID NO: 1386950 - RNA, 30 nt, Human
ugacagggaagugaaaucucagaaagaaaa

SEQ ID NO: 1386951 - RNA, 21 nt, Human
uggccugguuacggcucacgc

SEQ ID NO: 1386952 - RNA, 23 nt, Human
uuaaaaaacugaaaggucagaag

SEQ ID NO: 1386953 - RNA, 18 nt, Human
uuaaacuaaaaggaaacc

SEQ ID NO: 1386954 - RNA, 25 nt, Human
uuacaugcauauuaucacaugugua

SEQ ID NO: 1386955 - RNA, 21 nt, Human
uuagagaagaggaggcagaug

SEQ ID NO: 1386956 - RNA, 26 nt, Human
uuuuauaauugaaguaacuuaucacc

SEQ ID NO: 1386957 - RNA, 22 nt, Human
aaacagcaccucccggaccagc

SEQ ID NO: 1386958 - RNA, 23 nt, Human
aaguucuucaauagcagcaguuu

SEQ ID NO: 1386959 - RNA, 21 nt, Human
agacaggaagguuaggucaga

SEQ ID NO: 1386960 - RNA, 19 nt, Human
agcguuggccugggggcga

SEQ ID NO: 1386961 - RNA, 25 nt, Human
agcugcagugucuucugcuguaagg

SEQ ID NO: 1386962 - RNA, 19 nt, Human
aggagacaggaagguuagg

SEQ ID NO: 1386963 - RNA, 21 nt, Human
agggggcauuaauacugcccu

SEQ ID NO: 1386964 - RNA, 21 nt, Human
agguuaggucagaaguaugcu

SEQ ID NO: 1386965 - RNA, 24 nt, Human
aguggccucccaccaugagccuca

SEQ ID NO: 1386966 - RNA, 23 nt, Human
augguaccgggcaccaugaagca

SEQ ID NO: 1386967 - RNA, 22 nt, Human
caauagcagcaguuuggggaca

SEQ ID NO: 1386968 - RNA, 19 nt, Human
cacaaccacugcucuuuuu

SEQ ID NO: 1386969 - RNA, 19 nt, Human
cagaaaagagcacaaccac

SEQ ID NO: 1386970 - RNA, 18 nt, Human
cagaaagggucagaaaca

SEQ ID NO: 1386971 - RNA, 23 nt, Human
cagaaguccuuggguucuaccag

SEQ ID NO: 1386972 - RNA, 21 nt, Human
cagauagagcuucccucccag

SEQ ID NO: 1386973 - RNA, 24 nt, Human
caggucuugggguuuggucggggg

SEQ ID NO: 1386974 - RNA, 22 nt, Human
ccaggggccaccagcccaggau

SEQ ID NO: 1386975 - RNA, 22 nt, Human
ccaggucuugggguuuggucgg

SEQ ID NO: 1386976 - RNA, 18 nt, Human
cccaaaagcccugcaugc

SEQ ID NO: 1386977 - RNA, 23 nt, Human
cccaaaagcccugcaugcugucc

SEQ ID NO: 1386978 - RNA, 19 nt, Human
ccccaaaagcccugcaugc

SEQ ID NO: 1386979 - RNA, 24 nt, Human
ccccaaaagcccugcaugcugucc

SEQ ID NO: 1386980 - RNA, 21 nt, Human
ccccaccccaacacagucaaa

SEQ ID NO: 1386981 - RNA, 24 nt, Human
ccccugaauguacaucaauuucca

SEQ ID NO: 1386982 - RNA, 22 nt, Human
ccggccucucccacauuucucc

SEQ ID NO: 1386983 - RNA, 25 nt, Human
ccguccccugaauguacaucaauuu

SEQ ID NO: 1386984 - RNA, 18 nt, Human
ccucccaguggacccugc

SEQ ID NO: 1386985 - RNA, 23 nt, Human
ccuugggacccugggggagaugu

SEQ ID NO: 1386986 - RNA, 19 nt, Human
ccuuuucgagcagcagcua

SEQ ID NO: 1386987 - RNA, 23 nt, Human
cggagccaggggccaccagccca

SEQ ID NO: 1386988 - RNA, 27 nt, Human
cuccauggcuuugcccuuaauguugcu

SEQ ID NO: 1386989 - RNA, 25 nt, Human
cucugcauuuggccucauucugcug

SEQ ID NO: 1386990 - RNA, 27 nt, Human
cucuuuuucacuauuuuacagcuauuu

SEQ ID NO: 1386991 - RNA, 25 nt, Human
cugcggggccuugggacccuggggg

SEQ ID NO: 1386992 - RNA, 20 nt, Human
cugcugcuucucaguaccca

SEQ ID NO: 1386993 - RNA, 23 nt, Human
cuuucagggggcuguugugagga

SEQ ID NO: 1386994 - RNA, 19 nt, Human
cuuuuugggauggcucugg

SEQ ID NO: 1386995 - RNA, 23 nt, Human
gaaaagagcacaaccacugcucu

SEQ ID NO: 1386996 - RNA, 23 nt, Human
gagaccacuccgacagaaagggu

SEQ ID NO: 1386997 - RNA, 22 nt, Human
gagcagcagcuaggaaggugag

SEQ ID NO: 1386998 - RNA, 21 nt, Human
gauggaggagcggggggaagc

SEQ ID NO: 1386999 - RNA, 20 nt, Human
gauuucauuccuuucucagu

SEQ ID NO: 1387000 - RNA, 26 nt, Human
gcaaacuuuccuuuagggcuuuguaa

SEQ ID NO: 1387001 - RNA, 20 nt, Human
gccccaaaagcccugcaugc

SEQ ID NO: 1387002 - RNA, 20 nt, Human
ggacaucacguguagcccug

SEQ ID NO: 1387003 - RNA, 20 nt, Human
ggacaucacguguagcccug

SEQ ID NO: 1387004 - RNA, 21 nt, Human
ggacaucacguguagcccugu

SEQ ID NO: 1387005 - RNA, 18 nt, Human
ggagacaggaagguuagg

SEQ ID NO: 1387006 - RNA, 21 nt, Human
gggggaggaagcugcggggcc

SEQ ID NO: 1387007 - RNA, 21 nt, Human
ggucgggggaggaagcugcgg

SEQ ID NO: 1387008 - RNA, 22 nt, Human
gucuggacucuggaguacagga

SEQ ID NO: 1387009 - RNA, 24 nt, Human
guggagacuguugucuccugggau

SEQ ID NO: 1387010 - RNA, 20 nt, Human
uacccaacccccaccccaac

SEQ ID NO: 1387011 - RNA, 20 nt, Human
uagcugcaucccaugucagu

SEQ ID NO: 1387012 - RNA, 21 nt, Human
ucacaggguuguugcaagaca

SEQ ID NO: 1387013 - RNA, 25 nt, Human
ucauacacucuuccgguaauuugga

SEQ ID NO: 1387014 - RNA, 21 nt, Human
ucccacaaguuccaacccuaa

SEQ ID NO: 1387015 - RNA, 20 nt, Human
ucccacauuucuccauggcu

SEQ ID NO: 1387016 - RNA, 20 nt, Human
ucuccugggauccaggucuu

SEQ ID NO: 1387017 - RNA, 24 nt, Human
ucuccugggauccaggucuugggg

SEQ ID NO: 1387018 - RNA, 20 nt, Human
ugaagcaucuugaaaguggu

SEQ ID NO: 1387019 - RNA, 23 nt, Human
ugaauacaucacauucaaucuuc

SEQ ID NO: 1387020 - RNA, 24 nt, Human
ugaccauucccuuacccaaccccc

SEQ ID NO: 1387021 - RNA, 21 nt, Human
ugacgguaagagugacauucu

SEQ ID NO: 1387022 - RNA, 18 nt, Human
ugaguucccagauagagc

SEQ ID NO: 1387023 - RNA, 21 nt, Human
ugcagugucuucugcuguaag

SEQ ID NO: 1387024 - RNA, 20 nt, Human
ugcugacuuuuugggauggc

SEQ ID NO: 1387025 - RNA, 19 nt, Human
ugcuguccauacccaucac

SEQ ID NO: 1387026 - RNA, 26 nt, Human
ugggaaguucuucaauagcagcaguu

SEQ ID NO: 1387027 - RNA, 18 nt, Human
ugggggcgacccaacugc

SEQ ID NO: 1387028 - RNA, 22 nt, Human
uggugccaggugauugguuucc

SEQ ID NO: 1387029 - RNA, 22 nt, Human
uguaaaccuuagcuguucuagc

SEQ ID NO: 1387030 - RNA, 21 nt, Human
uguaaagaaguuuugggaagu

SEQ ID NO: 1387031 - RNA, 24 nt, Human
uguggaggcugagggugauggagg

SEQ ID NO: 1387032 - RNA, 20 nt, Human
uguugagaccuagggcagau

SEQ ID NO: 1387033 - RNA, 18 nt, Human
uguugugaggauggaaug

SEQ ID NO: 1387034 - RNA, 19 nt, Human
uugaggccggccucuccca

SEQ ID NO: 1387035 - RNA, 23 nt, Human
uuuccuguuccauccagcauucu

SEQ ID NO: 1387036 - RNA, 18 nt, Human
uuuguaaagaaguuuugg

SEQ ID NO: 1387037 - RNA, 21 nt, Human
aaacaccugccccacguccuc

SEQ ID NO: 1387038 - RNA, 24 nt, Human
aaagugcugggauuacaggcauga

SEQ ID NO: 1387039 - RNA, 18 nt, Human
aaagugugaguugacccc

SEQ ID NO: 1387040 - RNA, 21 nt, Human
aaccuggccaaaaacacccag

SEQ ID NO: 1387041 - RNA, 24 nt, Human
aagugaucugcccgccucggccuc

SEQ ID NO: 1387042 - RNA, 21 nt, Human
aagugcugaagaucagagugg

SEQ ID NO: 1387043 - RNA, 19 nt, Human
aagugcugggauuacaggc

SEQ ID NO: 1387044 - RNA, 21 nt, Human
aagugcugggauuacaggcau

SEQ ID NO: 1387045 - RNA, 18 nt, Human
aauagcugggauuacagg

SEQ ID NO: 1387046 - RNA, 21 nt, Human
aaugcaguggugcaaucucug

SEQ ID NO: 1387047 - RNA, 23 nt, Human
accagcacacaaaucagggaccc

SEQ ID NO: 1387048 - RNA, 24 nt, Human
accauguugccaaggcuggucuug

SEQ ID NO: 1387049 - RNA, 19 nt, Human
accugcgucucuucuccuc

SEQ ID NO: 1387050 - RNA, 22 nt, Human
acgagaggggccguucugggug

SEQ ID NO: 1387051 - RNA, 25 nt, Human
acucugccgcccagguuggaaugca

SEQ ID NO: 1387052 - RNA, 21 nt, Human
agaaaacaccugccccacguc

SEQ ID NO: 1387053 - RNA, 24 nt, Human
agaaaacaccugccccacguccuc

SEQ ID NO: 1387054 - RNA, 20 nt, Human
agaaauauucucuucaucuu

SEQ ID NO: 1387055 - RNA, 23 nt, Human
agaugagaauccugaggcucaga

SEQ ID NO: 1387056 - RNA, 21 nt, Human
aggaggagcgggaggagccca

SEQ ID NO: 1387057 - RNA, 22 nt, Human
aggcugagagccaggaucaggg

SEQ ID NO: 1387058 - RNA, 27 nt, Human
agggaggaagugaacgagaggggaccc

SEQ ID NO: 1387059 - RNA, 20 nt, Human
agguucacagacaugucugc

SEQ ID NO: 1387060 - RNA, 18 nt, Human
augggguuucaccauguu

SEQ ID NO: 1387061 - RNA, 19 nt, Human
augggguuucaccauguug

SEQ ID NO: 1387062 - RNA, 24 nt, Human
caaagugcugggauuacaggcaug

SEQ ID NO: 1387063 - RNA, 22 nt, Human
caaccuggccaaaaacacccag

SEQ ID NO: 1387064 - RNA, 24 nt, Human
caccauguugccaaggcuggucuu

SEQ ID NO: 1387065 - RNA, 27 nt, Human
caccauguugccaaggcuggucuugaa

SEQ ID NO: 1387066 - RNA, 24 nt, Human
cacucugccgcccagguuggaaug

SEQ ID NO: 1387067 - RNA, 19 nt, Human
cagcaaaaggaccaggccg

SEQ ID NO: 1387068 - RNA, 23 nt, Human
cagcaaaaggaccaggccgaccg

SEQ ID NO: 1387069 - RNA, 19 nt, Human
cagcaauaagggccagaaa

SEQ ID NO: 1387070 - RNA, 22 nt, Human
cagcaauaagggccagaaauau

SEQ ID NO: 1387071 - RNA, 18 nt, Human
cagccucaggaggccugg

SEQ ID NO: 1387072 - RNA, 19 nt, Human
cagccugugccuccugggc

SEQ ID NO: 1387073 - RNA, 22 nt, Human
cagcugcacucccgggggugau

SEQ ID NO: 1387074 - RNA, 18 nt, Human
caggagacaccucaaugu

SEQ ID NO: 1387075 - RNA, 22 nt, Human
caggaggagcgggaggagcugg

SEQ ID NO: 1387076 - RNA, 24 nt, Human
caggcaugagucacugugccuggu

SEQ ID NO: 1387077 - RNA, 26 nt, Human
cagggacccuuuuugcucugaaguuu

SEQ ID NO: 1387078 - RNA, 18 nt, Human
cagugucuggcuauuugc

SEQ ID NO: 1387079 - RNA, 24 nt, Human
cauguugccaaggcuggucuugaa

SEQ ID NO: 1387080 - RNA, 18 nt, Human
cauuuggacuuuggguca

SEQ ID NO: 1387081 - RNA, 23 nt, Human
ccaaagugcugggauuacaggca

SEQ ID NO: 1387082 - RNA, 24 nt, Human
ccaaagugcugggauuacaggcau

SEQ ID NO: 1387083 - RNA, 22 nt, Human
ccaagagccccagguucacaga

SEQ ID NO: 1387084 - RNA, 22 nt, Human
ccaaggcuggucuugaacuccu

SEQ ID NO: 1387085 - RNA, 23 nt, Human
ccagcaauccuucugccucaacc

SEQ ID NO: 1387086 - RNA, 27 nt, Human
ccaucacuaccaauuugagagacacca

SEQ ID NO: 1387087 - RNA, 23 nt, Human
ccauugugcccagaagccaggau

SEQ ID NO: 1387088 - RNA, 24 nt, Human
cccaaagugcugggauuacaggca

SEQ ID NO: 1387089 - RNA, 20 nt, Human
cccaagagccccagguucac

SEQ ID NO: 1387090 - RNA, 18 nt, Human
cccaggaacucagggggg

SEQ ID NO: 1387091 - RNA, 23 nt, Human
cccaggaggagcgggaggagccc

SEQ ID NO: 1387092 - RNA, 23 nt, Human
ccccagguucacagacaugucug

SEQ ID NO: 1387093 - RNA, 24 nt, Human
ccccagugucuugcacagugccug

SEQ ID NO: 1387094 - RNA, 18 nt, Human
cccggaggagaaaacacc

SEQ ID NO: 1387095 - RNA, 18 nt, Human
ccucaggaggccuggucu

SEQ ID NO: 1387096 - RNA, 23 nt, Human
ccugaauagcugggauuacaggu

SEQ ID NO: 1387097 - RNA, 24 nt, Human
ccugaauagcugggauuacaggug

SEQ ID NO: 1387098 - RNA, 19 nt, Human
ccugaccucaagugaucug

SEQ ID NO: 1387099 - RNA, 22 nt, Human
ccugaccucaagugaucugccc

SEQ ID NO: 1387100 - RNA, 20 nt, Human
ccugcgucucuucuccucuu

SEQ ID NO: 1387101 - RNA, 19 nt, Human
ccugggcuccagcaauccu

SEQ ID NO: 1387102 - RNA, 24 nt, Human
ccuucugccucaaccuccugaaua

SEQ ID NO: 1387103 - RNA, 24 nt, Human
cgccucggccucccaaagugcugg

SEQ ID NO: 1387104 - RNA, 18 nt, Human
cgggaggagcccagcugc

SEQ ID NO: 1387105 - RNA, 22 nt, Human
cguggcccaguucacaccccuu

SEQ ID NO: 1387106 - RNA, 23 nt, Human
cuaaagacuuuucuccccagcag

SEQ ID NO: 1387107 - RNA, 21 nt, Human
cucacugcagccugugccucc

SEQ ID NO: 1387108 - RNA, 24 nt, Human
cucacugcagccugugccuccugg

SEQ ID NO: 1387109 - RNA, 21 nt, Human
cuccagcaauccuucugcccc

SEQ ID NO: 1387110 - RNA, 24 nt, Human
cuccugaauagcugggauuacagg

SEQ ID NO: 1387111 - RNA, 26 nt, Human
cuccugaccucaagugaucugcccgc

SEQ ID NO: 1387112 - RNA, 21 nt, Human
cuccugggcuccagcaauccu

SEQ ID NO: 1387113 - RNA, 24 nt, Human
cugaauagcugggauuacaggugu

SEQ ID NO: 1387114 - RNA, 18 nt, Human
cugcacucccggggguga

SEQ ID NO: 1387115 - RNA, 23 nt, Human
cugcagccugugccuccugggcu

SEQ ID NO: 1387116 - RNA, 25 nt, Human
cuggccaaaaacacccagcuaacaa

SEQ ID NO: 1387117 - RNA, 19 nt, Human
cuguuucuacaucauuucc

SEQ ID NO: 1387118 - RNA, 19 nt, Human
cuuccccacagacucccca

SEQ ID NO: 1387119 - RNA, 18 nt, Human
cuucugccucaaccuccu

SEQ ID NO: 1387120 - RNA, 24 nt, Human
cuuguccaagccucucuggccacc

SEQ ID NO: 1387121 - RNA, 22 nt, Human
gaagaagucccaggaacucagg

SEQ ID NO: 1387122 - RNA, 19 nt, Human
gaauagcugggauuacagg

SEQ ID NO: 1387123 - RNA, 24 nt, Human
gaauagcugggauuacaggugugc

SEQ ID NO: 1387124 - RNA, 24 nt, Human
gaccucaagugaucugcccgccuc

SEQ ID NO: 1387125 - RNA, 18 nt, Human
gagaugggguuucaccau

SEQ ID NO: 1387126 - RNA, 23 nt, Human
gagaugggguuucaccauguugc

SEQ ID NO: 1387127 - RNA, 22 nt, Human
gaugggguuucaccauguugcc

SEQ ID NO: 1387128 - RNA, 18 nt, Human
gauuacaggcaugaguca

SEQ ID NO: 1387129 - RNA, 21 nt, Human
gauuacaggcaugagucacug

SEQ ID NO: 1387130 - RNA, 24 nt, Human
gauuacaggcaugagucacugugc

SEQ ID NO: 1387131 - RNA, 24 nt, Human
gauuacaggugugcaucaccaugc

SEQ ID NO: 1387132 - RNA, 21 nt, Human
gcaaccuggccaaaaacaccc

SEQ ID NO: 1387133 - RNA, 20 nt, Human
gcaacguguugcugcccaag

SEQ ID NO: 1387134 - RNA, 24 nt, Human
gccccacguccucuuggcuggcca

SEQ ID NO: 1387135 - RNA, 23 nt, Human
gcuggucuugaacuccugaccuc

SEQ ID NO: 1387136 - RNA, 19 nt, Human
ggaggaagugaacgagagg

SEQ ID NO: 1387137 - RNA, 18 nt, Human
ggagggcgaggaugagga

SEQ ID NO: 1387138 - RNA, 24 nt, Human
ggauuacaggcaugagucacugug

SEQ ID NO: 1387139 - RNA, 19 nt, Human
ggcaggugcagggaggaag

SEQ ID NO: 1387140 - RNA, 19 nt, Human
ggccaagauccccagcagc

SEQ ID NO: 1387141 - RNA, 24 nt, Human
ggcuggucuugaacuccugaccuc

SEQ ID NO: 1387142 - RNA, 22 nt, Human
gggacugacuucucaucugguc

SEQ ID NO: 1387143 - RNA, 22 nt, Human
gggcuccagcaauccuucugcc

SEQ ID NO: 1387144 - RNA, 21 nt, Human
ggguuucaccauguugccaag

SEQ ID NO: 1387145 - RNA, 19 nt, Human
ggucuugaacuccugaccu

SEQ ID NO: 1387146 - RNA, 22 nt, Human
ggugguucugcucuguuugcuu

SEQ ID NO: 1387147 - RNA, 24 nt, Human
gucagguguaaucccccacaaaag

SEQ ID NO: 1387148 - RNA, 19 nt, Human
gucucauuucuuaucccca

SEQ ID NO: 1387149 - RNA, 24 nt, Human
gugaucugcccgccucggccuccc

SEQ ID NO: 1387150 - RNA, 19 nt, Human
guggagaugggguuucacc

SEQ ID NO: 1387151 - RNA, 21 nt, Human
guggagaugggguuucaccau

SEQ ID NO: 1387152 - RNA, 22 nt, Human
guggagaugggguuucaccaug

SEQ ID NO: 1387153 - RNA, 23 nt, Human
guggagaugggguuucaccaugu

SEQ ID NO: 1387154 - RNA, 18 nt, Human
guggcuugcuagguggaa

SEQ ID NO: 1387155 - RNA, 23 nt, Human
gugugcaaccuggccaaaaacac

SEQ ID NO: 1387156 - RNA, 28 nt, Human
uaaagacuuuucuccccagcagagauuc

SEQ ID NO: 1387157 - RNA, 21 nt, Human
uaacaagugcugaagaucaga

SEQ ID NO: 1387158 - RNA, 22 nt, Human
uaauuuuuuguauuuuuggugg

SEQ ID NO: 1387159 - RNA, 24 nt, Human
uaauuuuuuguauuuuugguggag

SEQ ID NO: 1387160 - RNA, 25 nt, Human
uaauuuuuuguauuuuugguggaga

SEQ ID NO: 1387161 - RNA, 18 nt, Human
uacagcaccugcgucucu

SEQ ID NO: 1387162 - RNA, 22 nt, Human
uacaggcaugagucacugugcc

SEQ ID NO: 1387163 - RNA, 19 nt, Human
uaucagggguggaaggggc

SEQ ID NO: 1387164 - RNA, 20 nt, Human
uaugcaagggcacaagaguc

SEQ ID NO: 1387165 - RNA, 21 nt, Human
uaugcagccucaggaggccug

SEQ ID NO: 1387166 - RNA, 24 nt, Human
ucacugcagccugugccuccuggg

SEQ ID NO: 1387167 - RNA, 25 nt, Human
ucacugcagccugugccuccugggc

SEQ ID NO: 1387168 - RNA, 23 nt, Human
ucauuuugcuucucuuuucucug

SEQ ID NO: 1387169 - RNA, 24 nt, Human
ucccaaagugcugggauuacaggc

SEQ ID NO: 1387170 - RNA, 21 nt, Human
ucccaggaacucaggggggcc

SEQ ID NO: 1387171 - RNA, 23 nt, Human
ucccaggaacucaggggggccaa

SEQ ID NO: 1387172 - RNA, 24 nt, Human
uccccaaguuccgagguaaaggga

SEQ ID NO: 1387173 - RNA, 22 nt, Human
uccccacagacuccccaggagc

SEQ ID NO: 1387174 - RNA, 21 nt, Human
uccccaggagcauugcccagg

SEQ ID NO: 1387175 - RNA, 22 nt, Human
uccccagucagggugcaguguc

SEQ ID NO: 1387176 - RNA, 22 nt, Human
uccccagugucuugcacagugc

SEQ ID NO: 1387177 - RNA, 24 nt, Human
uccugaauagcugggauuacaggu

SEQ ID NO: 1387178 - RNA, 20 nt, Human
uccugggcuccagcaauccu

SEQ ID NO: 1387179 - RNA, 24 nt, Human
uccuucugccucaaccuccugaau

SEQ ID NO: 1387180 - RNA, 18 nt, Human
ucggccucccaaagugcu

SEQ ID NO: 1387181 - RNA, 18 nt, Human
ucuacugagaccucuuca

SEQ ID NO: 1387182 - RNA, 23 nt, Human
ucucacucugccgcccagguugg

SEQ ID NO: 1387183 - RNA, 24 nt, Human
ucucacucugccgcccagguugga

SEQ ID NO: 1387184 - RNA, 24 nt, Human
ucucuucaucuuacagaugagaau

SEQ ID NO: 1387185 - RNA, 21 nt, Human
ucuugaacuccugaccucaag

SEQ ID NO: 1387186 - RNA, 18 nt, Human
ugaccucaagugaucugc

SEQ ID NO: 1387187 - RNA, 24 nt, Human
ugaccucaagugaucugcccgccu

SEQ ID NO: 1387188 - RNA, 19 nt, Human
ugaguugacccccaucacu

SEQ ID NO: 1387189 - RNA, 18 nt, Human
ugcaaucucugcucacug

SEQ ID NO: 1387190 - RNA, 24 nt, Human
ugccaaggcuggucuugaacuccu

SEQ ID NO: 1387191 - RNA, 27 nt, Human
ugccucaaccuccugaauagcugggau

SEQ ID NO: 1387192 - RNA, 24 nt, Human
ugccuccugggcuccagcaauccu

SEQ ID NO: 1387193 - RNA, 22 nt, Human
ugccugcugcugccuucucugc

SEQ ID NO: 1387194 - RNA, 24 nt, Human
ugcucugaaguuuccugaugcaaa

SEQ ID NO: 1387195 - RNA, 24 nt, Human
ugcugaagaucagagugggacugg

SEQ ID NO: 1387196 - RNA, 24 nt, Human
ugcugggauuacaggcaugaguca

SEQ ID NO: 1387197 - RNA, 18 nt, Human
uggaaugcaguggugcaa

SEQ ID NO: 1387198 - RNA, 19 nt, Human
uggaaugcaguggugcaau

SEQ ID NO: 1387199 - RNA, 30 nt, Human
uggccaaaaacacccagcuaacaagugcuu

SEQ ID NO: 1387200 - RNA, 18 nt, Human
ugggauuacaggcaugag

SEQ ID NO: 1387201 - RNA, 21 nt, Human
ugggauuacaggcaugaguca

SEQ ID NO: 1387202 - RNA, 22 nt, Human
ugggauuacaggcaugagucac

SEQ ID NO: 1387203 - RNA, 22 nt, Human
ugggauuacaggcaugagucac

SEQ ID NO: 1387204 - RNA, 22 nt, Human
ugggauuacaggcaugagucac

SEQ ID NO: 1387205 - RNA, 23 nt, Human
ugggauuacaggcaugagucacu

SEQ ID NO: 1387206 - RNA, 24 nt, Human
ugggauuacaggcaugagucacug

SEQ ID NO: 1387207 - RNA, 22 nt, Human
ugggauuacaggugugcaucaa

SEQ ID NO: 1387208 - RNA, 22 nt, Human
ugggauuacaggugugcaucac

SEQ ID NO: 1387209 - RNA, 24 nt, Human
ugggauuacaggugugcaucacca

SEQ ID NO: 1387210 - RNA, 24 nt, Human
ugggauuacaggugugcaucacca

SEQ ID NO: 1387211 - RNA, 25 nt, Human
ugggauuacaggugugcaucaccau

SEQ ID NO: 1387212 - RNA, 24 nt, Human
ugggcuccagcaauccuucugccu

SEQ ID NO: 1387213 - RNA, 23 nt, Human
ugggguuucaccauguugccaag

SEQ ID NO: 1387214 - RNA, 23 nt, Human
ugguggagaugggguuucaccau

SEQ ID NO: 1387215 - RNA, 24 nt, Human
ugguggagaugggguuucaccaug

SEQ ID NO: 1387216 - RNA, 22 nt, Human
ugugcaaccuggccaaaaacac

SEQ ID NO: 1387217 - RNA, 22 nt, Human
uguugcugcccaagagccccag

SEQ ID NO: 1387218 - RNA, 24 nt, Human
uuacagaugagaauccugaggcuc

SEQ ID NO: 1387219 - RNA, 24 nt, Human
uucccugccuuaucucuuuucgau

SEQ ID NO: 1387220 - RNA, 24 nt, Human
uugguggagaugggguuucaccau

SEQ ID NO: 1387221 - RNA, 21 nt, Human
uuucaccauguugccaaggcu

SEQ ID NO: 1387222 - RNA, 24 nt, Human
uuuuguaugcuugacaucuggugu

SEQ ID NO: 1387223 - RNA, 22 nt, Human
uuuuugguggagaugggguuuc

SEQ ID NO: 1387224 - RNA, 24 nt, Human
uuuuugguggagaugggguuucac

SEQ ID NO: 1387225 - RNA, 21 nt, Human
uuuuuguauuuuugguggaga

SEQ ID NO: 1387226 - RNA, 24 nt, Human
uuuuuuguauuuuugguggagaug

SEQ ID NO: 1387227 - RNA, 20 nt, Human
aaaaaaauacaccugaccau

SEQ ID NO: 1387228 - RNA, 23 nt, Human
aaaacaaaaaaaacaaaacaccc

SEQ ID NO: 1387229 - RNA, 18 nt, Human
aaaacacccaaaacagcu

SEQ ID NO: 1387230 - RNA, 23 nt, Human
aaacaaaaaaaacaaaacaccca

SEQ ID NO: 1387231 - RNA, 25 nt, Human
aaacaaaaaaaacaaaacacccaaa

SEQ ID NO: 1387232 - RNA, 21 nt, Human
aaacaaaacacccaaaacagc

SEQ ID NO: 1387233 - RNA, 26 nt, Human
aaagcaaaaugcuauaaaaacaaaaa

SEQ ID NO: 1387234 - RNA, 24 nt, Human
aacaaaaaaaacaaaacacccaaa

SEQ ID NO: 1387235 - RNA, 23 nt, Human
aacaaacccaaccaccugugcac

SEQ ID NO: 1387236 - RNA, 25 nt, Human
aacacaguucgucaguuggccaccu

SEQ ID NO: 1387237 - RNA, 18 nt, Human
aacauucacacguuucca

SEQ ID NO: 1387238 - RNA, 23 nt, Human
aaugacuguuugggacccccaug

SEQ ID NO: 1387239 - RNA, 23 nt, Human
acaaaaaaaacaaaacacccaaa

SEQ ID NO: 1387240 - RNA, 24 nt, Human
acaaaacacccaaaaccagcuacu

SEQ ID NO: 1387241 - RNA, 24 nt, Human
acaaagauucuaaacacuggcuuu

SEQ ID NO: 1387242 - RNA, 24 nt, Human
accaggucuacguccugaaaauac

SEQ ID NO: 1387243 - RNA, 22 nt, Human
acccaaaacagcucucccuccu

SEQ ID NO: 1387244 - RNA, 18 nt, Human
acuguauuauaacaaagu

SEQ ID NO: 1387245 - RNA, 19 nt, Human
agaaaaacaggggagacaa

SEQ ID NO: 1387246 - RNA, 21 nt, Human
agaaaaacaggggagacaaaa

SEQ ID NO: 1387247 - RNA, 22 nt, Human
agaaaaacaggggagacaaaac

SEQ ID NO: 1387248 - RNA, 20 nt, Human
aggaagcauaaaaaaacagc

SEQ ID NO: 1387249 - RNA, 24 nt, Human
auaaaaacaaaaaaaacaaaacac

SEQ ID NO: 1387250 - RNA, 21 nt, Human
auccacacacugccacucuuc

SEQ ID NO: 1387251 - RNA, 25 nt, Human
aucugcacaaagauucuaaacacca

SEQ ID NO: 1387252 - RNA, 20 nt, Human
caaaaaaaacaaaacaccca

SEQ ID NO: 1387253 - RNA, 23 nt, Human
caaaaaaaacaaaacacccaaaa

SEQ ID NO: 1387254 - RNA, 21 nt, Human
caaacaaacccaaccaccugu

SEQ ID NO: 1387255 - RNA, 18 nt, Human
cacaccucucucccccca

SEQ ID NO: 1387256 - RNA, 24 nt, Human
caccaacgaccagacuagcaacag

SEQ ID NO: 1387257 - RNA, 23 nt, Human
caccagcagcgagcgcggaagcc

SEQ ID NO: 1387258 - RNA, 19 nt, Human
cagaaaaacaggggagaca

SEQ ID NO: 1387259 - RNA, 19 nt, Human
cagcaaacacauguaccua

SEQ ID NO: 1387260 - RNA, 22 nt, Human
cagcaaacacauguaccuagaa

SEQ ID NO: 1387261 - RNA, 23 nt, Human
cagcagcgagcgcggaagccucg

SEQ ID NO: 1387262 - RNA, 24 nt, Human
cagcuugaagcuuuccuuccucag

SEQ ID NO: 1387263 - RNA, 19 nt, Human
caggaacaaauaugaccac

SEQ ID NO: 1387264 - RNA, 22 nt, Human
ccaaacuuugaaaauacaauaa

SEQ ID NO: 1387265 - RNA, 21 nt, Human
ccaagaaaaagcaaaaugcua

SEQ ID NO: 1387266 - RNA, 18 nt, Human
cccauggccagcuugaag

SEQ ID NO: 1387267 - RNA, 19 nt, Human
ccccacguagugacccacc

SEQ ID NO: 1387268 - RNA, 20 nt, Human
ccccccacguagugacccac

SEQ ID NO: 1387269 - RNA, 26 nt, Human
ccccgccgcgcuccgcuccagacccg

SEQ ID NO: 1387270 - RNA, 19 nt, Human
cccgcgcggccucgccggc

SEQ ID NO: 1387271 - RNA, 23 nt, Human
cccugccuacccagcgccuucca

SEQ ID NO: 1387272 - RNA, 18 nt, Human
ccgccgcgcuccgcucca

SEQ ID NO: 1387273 - RNA, 23 nt, Human
cgcaggcagaaaaacaggggaga

SEQ ID NO: 1387274 - RNA, 21 nt, Human
cgccgccgccucuuccagccc

SEQ ID NO: 1387275 - RNA, 22 nt, Human
cgccuauuaauaaaaaaauaca

SEQ ID NO: 1387276 - RNA, 18 nt, Human
cgcuccgcuccagacccg

SEQ ID NO: 1387277 - RNA, 20 nt, Human
cuccccucccugccuaccca

SEQ ID NO: 1387278 - RNA, 25 nt, Human
cuccgcuccagacccgcgcggccuc

SEQ ID NO: 1387279 - RNA, 23 nt, Human
cucgcugucaccaacgaccagac

SEQ ID NO: 1387280 - RNA, 18 nt, Human
cucucccuccuuugaucu

SEQ ID NO: 1387281 - RNA, 20 nt, Human
cugugcacaaugcuuccacc

SEQ ID NO: 1387282 - RNA, 18 nt, Human
cuucaagaccaaccgucc

SEQ ID NO: 1387283 - RNA, 18 nt, Human
gaaauugaguggcuaaug

SEQ ID NO: 1387284 - RNA, 18 nt, Human
gaccagacuagcaacagg

SEQ ID NO: 1387285 - RNA, 21 nt, Human
gacuccuuaucaggugaacac

SEQ ID NO: 1387286 - RNA, 24 nt, Human
gagacaaaacgaaaggcucucuug

SEQ ID NO: 1387287 - RNA, 23 nt, Human
gcagcagcguacguacuguauag

SEQ ID NO: 1387288 - RNA, 19 nt, Human
gccaagucaauugcuuugg

SEQ ID NO: 1387289 - RNA, 22 nt, Human
gcuauaaaaacaaaaaaaacaa

SEQ ID NO: 1387290 - RNA, 23 nt, Human
gcuucacaccucucuccccccac

SEQ ID NO: 1387291 - RNA, 21 nt, Human
gggagaaauucaucaucacaa

SEQ ID NO: 1387292 - RNA, 21 nt, Human
gguacuggaaauugaguggcu

SEQ ID NO: 1387293 - RNA, 19 nt, Human
gucaaacaaacccaaccac

SEQ ID NO: 1387294 - RNA, 23 nt, Human
guuuccagcauguaccuccgcuu

SEQ ID NO: 1387295 - RNA, 23 nt, Human
uaaaaaaacagcaaagcacacga

SEQ ID NO: 1387296 - RNA, 26 nt, Human
uaaaaaaacagcaaagcacacgagua

SEQ ID NO: 1387297 - RNA, 26 nt, Human
uaaauuuugagcuugauauucucaua

SEQ ID NO: 1387298 - RNA, 18 nt, Human
uaacaagacagagcucug

SEQ ID NO: 1387299 - RNA, 26 nt, Human
uaagaucacaggaacaaauaugacca

SEQ ID NO: 1387300 - RNA, 21 nt, Human
uaccccaaagucagcaaacac

SEQ ID NO: 1387301 - RNA, 22 nt, Human
uaccccaaagucagcaaacaca

SEQ ID NO: 1387302 - RNA, 23 nt, Human
uaccuagaacucaucccaauugu

SEQ ID NO: 1387303 - RNA, 20 nt, Human
uagaacucaucccaauugua

SEQ ID NO: 1387304 - RNA, 21 nt, Human
uaucauaacaagacagagcuc

SEQ ID NO: 1387305 - RNA, 22 nt, Human
ucaaacaaacccaaccaccugu

SEQ ID NO: 1387306 - RNA, 19 nt, Human
ucaaauccacacacugcca

SEQ ID NO: 1387307 - RNA, 21 nt, Human
ucacaccucucuccccccacg

SEQ ID NO: 1387308 - RNA, 23 nt, Human
ucaguuggccaccuaaaguacaa

SEQ ID NO: 1387309 - RNA, 24 nt, Human
ucaucaucuaagccuggaaugacu

SEQ ID NO: 1387310 - RNA, 20 nt, Human
uccacacacugccacucuuc

SEQ ID NO: 1387311 - RNA, 28 nt, Human
uccacacacugccacucuucaagaccag

SEQ ID NO: 1387312 - RNA, 23 nt, Human
uccacugggccuucuuaaucuca

SEQ ID NO: 1387313 - RNA, 21 nt, Human
uccucagccacucugggcccc

SEQ ID NO: 1387314 - RNA, 20 nt, Human
ucucucaugaguccccaaau

SEQ ID NO: 1387315 - RNA, 21 nt, Human
ucugcagagguccucaaaucc

SEQ ID NO: 1387316 - RNA, 23 nt, Human
ucugcagagguccucaaauccac

SEQ ID NO: 1387317 - RNA, 21 nt, Human
ucuucaagaccaaccguccac

SEQ ID NO: 1387318 - RNA, 23 nt, Human
ugccauaggaaaauuacauucca

SEQ ID NO: 1387319 - RNA, 20 nt, Human
uggaaugacuguuugggacc

SEQ ID NO: 1387320 - RNA, 21 nt, Human
uguaccuccgcuucacaccuc

SEQ ID NO: 1387321 - RNA, 18 nt, Human
uguagugucuucucacuu

SEQ ID NO: 1387322 - RNA, 26 nt, Human
uguggcagcugcaaccauguaguguc

SEQ ID NO: 1387323 - RNA, 21 nt, Human
uucacaccucucuccccccac

SEQ ID NO: 1387324 - RNA, 22 nt, Human
uucacaccucucuccccccacg

SEQ ID NO: 1387325 - RNA, 23 nt, Human
uuccaagaaaaagcaaaaugcua

SEQ ID NO: 1387326 - RNA, 20 nt, Human
uuccaggaagcauaaaaaaa

SEQ ID NO: 1387327 - RNA, 21 nt, Human
uucuuaaucucauccaaaguc

SEQ ID NO: 1387328 - RNA, 18 nt, Human
uuguagguugcucaccag

SEQ ID NO: 1387329 - RNA, 24 nt, Human
uuuuuuuuuuuuuuuuuucauuuu

SEQ ID NO: 1387330 - RNA, 19 nt, Human
aaaaagaaaggaaaaggca

SEQ ID NO: 1387331 - RNA, 21 nt, Human
aaaaagaaaggaaaaggcaca

SEQ ID NO: 1387332 - RNA, 21 nt, Human
aaacgggagccugcaggcagc

SEQ ID NO: 1387333 - RNA, 21 nt, Human
aacacugcuccugucacccac

SEQ ID NO: 1387334 - RNA, 23 nt, Human
aacgggagccugcaggcagcccc

SEQ ID NO: 1387335 - RNA, 18 nt, Human
aagacaaaagacuuccuc

SEQ ID NO: 1387336 - RNA, 24 nt, Human
aagcggcuccccucccccaaguca

SEQ ID NO: 1387337 - RNA, 23 nt, Human
aauuucuaucuuaaaaaaaggaa

SEQ ID NO: 1387338 - RNA, 18 nt, Human
accagagaacccugagca

SEQ ID NO: 1387339 - RNA, 20 nt, Human
acccugagcagcuggaagac

SEQ ID NO: 1387340 - RNA, 25 nt, Human
acgccagccuguuguccucuggccu

SEQ ID NO: 1387341 - RNA, 21 nt, Human
agaagaacacucaaaaggaaa

SEQ ID NO: 1387342 - RNA, 21 nt, Human
agagaaaaacuuguaggcagg

SEQ ID NO: 1387343 - RNA, 19 nt, Human
agagaagaacacucaaaag

SEQ ID NO: 1387344 - RNA, 20 nt, Human
agagaagaacacucaaaagg

SEQ ID NO: 1387345 - RNA, 22 nt, Human
agagagcagcucgaggcucagg

SEQ ID NO: 1387346 - RNA, 20 nt, Human
agagcagcucgaggcucagg

SEQ ID NO: 1387347 - RNA, 21 nt, Human
auucugggagguaaacagucu

SEQ ID NO: 1387348 - RNA, 23 nt, Human
caaaacgccagccuguuguccuc

SEQ ID NO: 1387349 - RNA, 24 nt, Human
caaaaggaaaugauccaaucucac

SEQ ID NO: 1387350 - RNA, 21 nt, Human
caaauaacuucacuuuaaugu

SEQ ID NO: 1387351 - RNA, 25 nt, Human
cacauuugcuucccccaugauccaa

SEQ ID NO: 1387352 - RNA, 18 nt, Human
caccagaaccaccgccag

SEQ ID NO: 1387353 - RNA, 21 nt, Human
caccagaaccaccgccagcca

SEQ ID NO: 1387354 - RNA, 23 nt, Human
caccagaaccaccgccagccaac

SEQ ID NO: 1387355 - RNA, 21 nt, Human
cacccgggcucccucgugcuc

SEQ ID NO: 1387356 - RNA, 21 nt, Human
caccgccagccaacuggucag

SEQ ID NO: 1387357 - RNA, 19 nt, Human
cagagaaaaacuuguaggc

SEQ ID NO: 1387358 - RNA, 20 nt, Human
cagagagcagcucgaggcuc

SEQ ID NO: 1387359 - RNA, 20 nt, Human
cagcggccucagcuucaggc

SEQ ID NO: 1387360 - RNA, 23 nt, Human
cagggcaccacccgggcucccuc

SEQ ID NO: 1387361 - RNA, 26 nt, Human
caguaggauguguaaaaagaaaggaa

SEQ ID NO: 1387362 - RNA, 21 nt, Human
caguguaugacucgcaggaac

SEQ ID NO: 1387363 - RNA, 23 nt, Human
ccacaauagcuuuuguaccaaag

SEQ ID NO: 1387364 - RNA, 18 nt, Human
ccaggcgggcaugcucau

SEQ ID NO: 1387365 - RNA, 27 nt, Human
cccaaacauucugggagguaaacaguc

SEQ ID NO: 1387366 - RNA, 22 nt, Human
cccaagcugcccccauguaaag

SEQ ID NO: 1387367 - RNA, 23 nt, Human
cccaagcugcccccauguaaagu

SEQ ID NO: 1387368 - RNA, 23 nt, Human
cccacaauagcuuuuguaccaaa

SEQ ID NO: 1387369 - RNA, 19 nt, Human
cccccauguaaagugccgc

SEQ ID NO: 1387370 - RNA, 20 nt, Human
cccucgugcuccaccagaac

SEQ ID NO: 1387371 - RNA, 18 nt, Human
cccuggagauccagccgc

SEQ ID NO: 1387372 - RNA, 18 nt, Human
cccuggagauccagccgc

SEQ ID NO: 1387373 - RNA, 18 nt, Human
ccgcgugcccggggcugc

SEQ ID NO: 1387374 - RNA, 19 nt, Human
ccguuucgccgguaccgcu

SEQ ID NO: 1387375 - RNA, 23 nt, Human
ccucuggccugauuuuccucauc

SEQ ID NO: 1387376 - RNA, 18 nt, Human
ccugcaggcagccccgcc

SEQ ID NO: 1387377 - RNA, 26 nt, Human
ccuugaaagaggaccccagagaaaaa

SEQ ID NO: 1387378 - RNA, 18 nt, Human
cgcagcuccuucuccucc

SEQ ID NO: 1387379 - RNA, 24 nt, Human
cggccucagcuucaggcgcagcuc

SEQ ID NO: 1387380 - RNA, 20 nt, Human
cggcuccccucccccaaguc

SEQ ID NO: 1387381 - RNA, 18 nt, Human
cugcagagcaccuucucc

SEQ ID NO: 1387382 - RNA, 22 nt, Human
cuucacagucacguagcgggcu

SEQ ID NO: 1387383 - RNA, 19 nt, Human
gagcaacaguggggaagcg

SEQ ID NO: 1387384 - RNA, 19 nt, Human
gagcagcucgaggcucagg

SEQ ID NO: 1387385 - RNA, 21 nt, Human
gagcagcucgaggcucagggc

SEQ ID NO: 1387386 - RNA, 18 nt, Human
gaggagucugggcccaag

SEQ ID NO: 1387387 - RNA, 21 nt, Human
gccagccuguuguccucuggc

SEQ ID NO: 1387388 - RNA, 18 nt, Human
gcccggggcugcgcuggg

SEQ ID NO: 1387389 - RNA, 19 nt, Human
gcgcuggggucagcugugg

SEQ ID NO: 1387390 - RNA, 18 nt, Human
gcuacacagcggaggagu

SEQ ID NO: 1387391 - RNA, 19 nt, Human
gcugcaguucucggaucuu

SEQ ID NO: 1387392 - RNA, 19 nt, Human
ggaagcggcuccccucccc

SEQ ID NO: 1387393 - RNA, 22 nt, Human
ggaagguaccguggacauccuu

SEQ ID NO: 1387394 - RNA, 20 nt, Human
ggccugauuuuccucaucug

SEQ ID NO: 1387395 - RNA, 19 nt, Human
ggcucagggcaccacccgg

SEQ ID NO: 1387396 - RNA, 21 nt, Human
guggcuugcggguccagcagg

SEQ ID NO: 1387397 - RNA, 20 nt, Human
uaaaauacacacauuugcuu

SEQ ID NO: 1387398 - RNA, 23 nt, Human
uaaagugccgcgugcccggggcu

SEQ ID NO: 1387399 - RNA, 21 nt, Human
uaccaaagagaagaacacuca

SEQ ID NO: 1387400 - RNA, 20 nt, Human
uagcgggcuggacucaaguu

SEQ ID NO: 1387401 - RNA, 21 nt, Human
ucaaaaaggucaucaaacucc

SEQ ID NO: 1387402 - RNA, 19 nt, Human
ucaaaaggaaaugauccaa

SEQ ID NO: 1387403 - RNA, 20 nt, Human
ucaagacagugacagagagc

SEQ ID NO: 1387404 - RNA, 22 nt, Human
ucagaggaccaugaaaagaauu

SEQ ID NO: 1387405 - RNA, 20 nt, Human
ucagcgccuuuuccuucucc

SEQ ID NO: 1387406 - RNA, 22 nt, Human
ucaguucccaacaaaacgccag

SEQ ID NO: 1387407 - RNA, 23 nt, Human
uccagguagcuaggaaggcggcu

SEQ ID NO: 1387408 - RNA, 18 nt, Human
ucccuggagauccagccg

SEQ ID NO: 1387409 - RNA, 26 nt, Human
ucucggaucuuggcccggagcauuuu

SEQ ID NO: 1387410 - RNA, 20 nt, Human
ucugagcacgccaaagacuc

SEQ ID NO: 1387411 - RNA, 20 nt, Human
ucugagcaucacccuggcuu

SEQ ID NO: 1387412 - RNA, 18 nt, Human
ucuuacagaugccuacua

SEQ ID NO: 1387413 - RNA, 18 nt, Human
ucuuggaccagagaaccc

SEQ ID NO: 1387414 - RNA, 21 nt, Human
ugaaauguuuuauuuaaugcu

SEQ ID NO: 1387415 - RNA, 19 nt, Human
ugauucaagacagugacag

SEQ ID NO: 1387416 - RNA, 20 nt, Human
ugcccggggcugcgcugggg

SEQ ID NO: 1387417 - RNA, 21 nt, Human
ugcccggggcugcgcuggggu

SEQ ID NO: 1387418 - RNA, 22 nt, Human
ugcccggggcugcgcugggguc

SEQ ID NO: 1387419 - RNA, 24 nt, Human
uggcuagucugaggccucagcugg

SEQ ID NO: 1387420 - RNA, 24 nt, Human
uggggaagcggcuccccuccccca

SEQ ID NO: 1387421 - RNA, 24 nt, Human
uggugaucccguuucgccgguacc

SEQ ID NO: 1387422 - RNA, 22 nt, Human
ugucaccaggaaauagcuggug

SEQ ID NO: 1387423 - RNA, 20 nt, Human
ugugcauguuuucaaaaagg

SEQ ID NO: 1387424 - RNA, 20 nt, Human
uuacuauugcuucuuucaga

SEQ ID NO: 1387425 - RNA, 23 nt, Human
uuagaaaugaugagguuuucuuu

SEQ ID NO: 1387426 - RNA, 19 nt, Human
uucaagacgcgucccugga

SEQ ID NO: 1387427 - RNA, 20 nt, Human
uucaggaggaagguaccgug

SEQ ID NO: 1387428 - RNA, 22 nt, Human
uucaggaggaagguaccgugga

SEQ ID NO: 1387429 - RNA, 18 nt, Human
uuccucaaguuucaggag

SEQ ID NO: 1387430 - RNA, 23 nt, Human
uuccucaaguuucaggaggaagg

SEQ ID NO: 1387431 - RNA, 21 nt, Human
uuguaccaaagagaagaacac

SEQ ID NO: 1387432 - RNA, 23 nt, Human
aaaaacacacaccccacaugccc

SEQ ID NO: 1387433 - RNA, 22 nt, Human
aaaaagccaccuccccaaacac

SEQ ID NO: 1387434 - RNA, 23 nt, Human
aaaacacacaccccacaugccca

SEQ ID NO: 1387435 - RNA, 19 nt, Human
aaacacacaccccacaugc

SEQ ID NO: 1387436 - RNA, 23 nt, Human
aaacacaguccccucguucccca

SEQ ID NO: 1387437 - RNA, 24 nt, Human
aaacacaguccccucguuccccac

SEQ ID NO: 1387438 - RNA, 22 nt, Human
aagguaaaaacacacaccccac

SEQ ID NO: 1387439 - RNA, 22 nt, Human
acaguccccucguuccccaccu

SEQ ID NO: 1387440 - RNA, 22 nt, Human
accacugccugggacucuccug

SEQ ID NO: 1387441 - RNA, 18 nt, Human
agauaugaaaagucgacu

SEQ ID NO: 1387442 - RNA, 19 nt, Human
agccccuccucccaucccc

SEQ ID NO: 1387443 - RNA, 18 nt, Human
aggagaaagauaugaaaa

SEQ ID NO: 1387444 - RNA, 22 nt, Human
aggcaccccugcccugggccug

SEQ ID NO: 1387445 - RNA, 24 nt, Human
aggcggcccccggggcuguggcuc

SEQ ID NO: 1387446 - RNA, 24 nt, Human
caaaugguaaaaggcuuaaaaaca

SEQ ID NO: 1387447 - RNA, 23 nt, Human
caacgcgcacaacacaugcauuu

SEQ ID NO: 1387448 - RNA, 25 nt, Human
cacacaccccacaugccccccugag

SEQ ID NO: 1387449 - RNA, 20 nt, Human
caccaagguaaaaacacaca

SEQ ID NO: 1387450 - RNA, 25 nt, Human
caccccacaugcccacguggcccca

SEQ ID NO: 1387451 - RNA, 21 nt, Human
caccuugugcaaucuaggccc

SEQ ID NO: 1387452 - RNA, 22 nt, Human
cacugagccgcuccucagcccc

SEQ ID NO: 1387453 - RNA, 18 nt, Human
cagccccuccucccaucc

SEQ ID NO: 1387454 - RNA, 20 nt, Human
cagcgccccggccugcgugc

SEQ ID NO: 1387455 - RNA, 22 nt, Human
caggaucugcugccaccacugg

SEQ ID NO: 1387456 - RNA, 21 nt, Human
cagucaacagcagacgaaaga

SEQ ID NO: 1387457 - RNA, 20 nt, Human
caugcccacguggccccaca

SEQ ID NO: 1387458 - RNA, 19 nt, Human
ccaccuccccaaacacagu

SEQ ID NO: 1387459 - RNA, 21 nt, Human
ccaccuccccaaacacagucc

SEQ ID NO: 1387460 - RNA, 24 nt, Human
ccauccccaacgcgcacaacacau

SEQ ID NO: 1387461 - RNA, 18 nt, Human
cccacacguggcaagggu

SEQ ID NO: 1387462 - RNA, 24 nt, Human
cccacacguggcaagggugggggu

SEQ ID NO: 1387463 - RNA, 22 nt, Human
cccacaugcccacguggcccca

SEQ ID NO: 1387464 - RNA, 25 nt, Human
ccccacacguggcaagggugggggu

SEQ ID NO: 1387465 - RNA, 22 nt, Human
ccccucguuccccaccuuccga

SEQ ID NO: 1387466 - RNA, 25 nt, Human
cccgcagcgccccggccugcgugcu

SEQ ID NO: 1387467 - RNA, 18 nt, Human
cccggaaccacagggcgc

SEQ ID NO: 1387468 - RNA, 18 nt, Human
ccuaauacuuagccccgc

SEQ ID NO: 1387469 - RNA, 21 nt, Human
ccucagccccuccucccaucc

SEQ ID NO: 1387470 - RNA, 21 nt, Human
ccugcccugggccugcaacac

SEQ ID NO: 1387471 - RNA, 23 nt, Human
ccuugccccugggugccacuggc

SEQ ID NO: 1387472 - RNA, 21 nt, Human
cgaaaaagccaccuccccaaa

SEQ ID NO: 1387473 - RNA, 22 nt, Human
cgguggcugugggaggugacac

SEQ ID NO: 1387474 - RNA, 21 nt, Human
cuaccucugcuuuuuuggggg

SEQ ID NO: 1387475 - RNA, 19 nt, Human
cugcgugcugggcgacucc

SEQ ID NO: 1387476 - RNA, 19 nt, Human
cugggucccguccgccagg

SEQ ID NO: 1387477 - RNA, 24 nt, Human
cuuagccccgcagcgccccggccg

SEQ ID NO: 1387478 - RNA, 27 nt, Human
cuuuuuuggggggcaggggaucaggca

SEQ ID NO: 1387479 - RNA, 19 nt, Human
gaaaaagccaccuccccaa

SEQ ID NO: 1387480 - RNA, 23 nt, Human
gaaaaagccaccuccccaaacac

SEQ ID NO: 1387481 - RNA, 25 nt, Human
gcagacgaaaaagccaccuccccaa

SEQ ID NO: 1387482 - RNA, 19 nt, Human
gcccugggccugcaacacc

SEQ ID NO: 1387483 - RNA, 20 nt, Human
gcuccucagccccuccuccc

SEQ ID NO: 1387484 - RNA, 21 nt, Human
ggaaggccuaauacuuagccc

SEQ ID NO: 1387485 - RNA, 22 nt, Human
ggcaggcaccccugcccugggc

SEQ ID NO: 1387486 - RNA, 24 nt, Human
ggggcaggcaccccugcccugggc

SEQ ID NO: 1387487 - RNA, 19 nt, Human
gugcugggcgacuccaccc

SEQ ID NO: 1387488 - RNA, 23 nt, Human
guggccccacacguggcaagggu

SEQ ID NO: 1387489 - RNA, 19 nt, Human
ucaaggggccccgggaggc

SEQ ID NO: 1387490 - RNA, 18 nt, Human
ucacgagaaaucguuggc

SEQ ID NO: 1387491 - RNA, 18 nt, Human
ucagccccuccucccauc

SEQ ID NO: 1387492 - RNA, 19 nt, Human
ucagccccuccucccaucc

SEQ ID NO: 1387493 - RNA, 18 nt, Human
uccccaaacacagucccc

SEQ ID NO: 1387494 - RNA, 22 nt, Human
ucccugggaaggccuaauacuu

SEQ ID NO: 1387495 - RNA, 27 nt, Human
ucccugggaaggccuaauacuuagccc

SEQ ID NO: 1387496 - RNA, 23 nt, Human
uccucagccccuccucccauccc

SEQ ID NO: 1387497 - RNA, 24 nt, Human
uccuugccccugggugccacuggc

SEQ ID NO: 1387498 - RNA, 22 nt, Human
ucucucggggagaaccagucuc

SEQ ID NO: 1387499 - RNA, 19 nt, Human
ucuggauuaagggucaggg

SEQ ID NO: 1387500 - RNA, 22 nt, Human
ugcccacguggccccacacgug

SEQ ID NO: 1387501 - RNA, 18 nt, Human
ugcccugggccugcaaca

SEQ ID NO: 1387502 - RNA, 23 nt, Human
ugcgaagcccggaaccacagggc

SEQ ID NO: 1387503 - RNA, 20 nt, Human
uggcaaggguggggguuggc

SEQ ID NO: 1387504 - RNA, 18 nt, Human
ugggaggugacacugagc

SEQ ID NO: 1387505 - RNA, 21 nt, Human
ugggaugcuuggcacgccccc

SEQ ID NO: 1387506 - RNA, 21 nt, Human
uucaggagaaagauaugaaaa

SEQ ID NO: 1387507 - RNA, 20 nt, Human
agaaaagccaaauacucuuc

SEQ ID NO: 1387508 - RNA, 20 nt, Human
agccaaauacucuuccacua

SEQ ID NO: 1387509 - RNA, 19 nt, Human
aucaucuucaucaucagaa

SEQ ID NO: 1387510 - RNA, 18 nt, Human
aucuacaucgccuuccuu

SEQ ID NO: 1387511 - RNA, 22 nt, Human
augcacgcauauuugaaauccc

SEQ ID NO: 1387512 - RNA, 23 nt, Human
caacgugugaagcagcggugccg

SEQ ID NO: 1387513 - RNA, 20 nt, Human
caacucaaagucauuuguuu

SEQ ID NO: 1387514 - RNA, 21 nt, Human
caagauuaccaagaaaagcca

SEQ ID NO: 1387515 - RNA, 21 nt, Human
caugacagaagaacggaauuc

SEQ ID NO: 1387516 - RNA, 19 nt, Human
cgaagcggccgcaucuccc

SEQ ID NO: 1387517 - RNA, 25 nt, Human
cuucuauucaaccaaggcaaucuca

SEQ ID NO: 1387518 - RNA, 19 nt, Human
cuuuugucaaguacaugac

SEQ ID NO: 1387519 - RNA, 21 nt, Human
gacacggucugaggaaaacag

SEQ ID NO: 1387520 - RNA, 21 nt, Human
gaggcacaaaaugggaagcaa

SEQ ID NO: 1387521 - RNA, 19 nt, Human
uaccaagaaaagccaaaua

SEQ ID NO: 1387522 - RNA, 20 nt, Human
uaccaagaaaagccaaauac

SEQ ID NO: 1387523 - RNA, 21 nt, Human
ucaaagucauuuguuucaccc

SEQ ID NO: 1387524 - RNA, 24 nt, Human
ucacaguuccaccaaaccgaacag

SEQ ID NO: 1387525 - RNA, 22 nt, Human
ucccgacaaacaacgugugaag

SEQ ID NO: 1387526 - RNA, 20 nt, Human
uccucgacgcgcccagcguc

SEQ ID NO: 1387527 - RNA, 18 nt, Human
ucuaacagcugguucuuc

SEQ ID NO: 1387528 - RNA, 21 nt, Human
ucucuaaugcacgcauauuug

SEQ ID NO: 1387529 - RNA, 26 nt, Human
ucugugauaugugucaaaauuugcag

SEQ ID NO: 1387530 - RNA, 22 nt, Human
ucuuuugucaaguacaugacag

SEQ ID NO: 1387531 - RNA, 20 nt, Human
ugacagaagaacggaauucu

SEQ ID NO: 1387532 - RNA, 19 nt, Human
ugauaaguugcucaaaguc

SEQ ID NO: 1387533 - RNA, 19 nt, Human
ugcagaggacgaagcggcc

SEQ ID NO: 1387534 - RNA, 23 nt, Human
uguuucacccuuuuuguacuuca

SEQ ID NO: 1387535 - RNA, 22 nt, Human
uucaaccaaggcaaucucaaua

SEQ ID NO: 1387536 - RNA, 26 nt, Human
aaacuugcgaccuaggaagcccuugg

SEQ ID NO: 1387537 - RNA, 23 nt, Human
aaagcccuucccaaacuugcgac

SEQ ID NO: 1387538 - RNA, 22 nt, Human
aacuugcgaccuaggaagcccu

SEQ ID NO: 1387539 - RNA, 21 nt, Human
aagcugcccagucaaguugcu

SEQ ID NO: 1387540 - RNA, 24 nt, Human
agauguaaaagcccuucccaaacu

SEQ ID NO: 1387541 - RNA, 24 nt, Human
aggaaagccaaagcuuguggucag

SEQ ID NO: 1387542 - RNA, 20 nt, Human
agggcuuugcgcagaucuuc

SEQ ID NO: 1387543 - RNA, 24 nt, Human
aucugugucagcaguucuggguuu

SEQ ID NO: 1387544 - RNA, 23 nt, Human
aucuuccgccauauguuucgcua

SEQ ID NO: 1387545 - RNA, 24 nt, Human
caccaagaauagccagacgcuuaa

SEQ ID NO: 1387546 - RNA, 26 nt, Human
caccaagaauagccagacgcuuaaca

SEQ ID NO: 1387547 - RNA, 22 nt, Human
caggucaacuccuuccuggagg

SEQ ID NO: 1387548 - RNA, 19 nt, Human
caguucuggguuuccaccu

SEQ ID NO: 1387549 - RNA, 23 nt, Human
cauccacgccaacuucauccacc

SEQ ID NO: 1387550 - RNA, 22 nt, Human
ccaaacuugcgaccuaggaagc

SEQ ID NO: 1387551 - RNA, 21 nt, Human
ccuccugauagauguaaaagc

SEQ ID NO: 1387552 - RNA, 22 nt, Human
ccuccugauagauguaaaagcc

SEQ ID NO: 1387553 - RNA, 24 nt, Human
cugauagauguaaaagcccuuccc

SEQ ID NO: 1387554 - RNA, 22 nt, Human
gauagauguaaaagcccuuccc

SEQ ID NO: 1387555 - RNA, 20 nt, Human
ggcaucuuuaaguauagucu

SEQ ID NO: 1387556 - RNA, 19 nt, Human
uagccuagugaguguggca

SEQ ID NO: 1387557 - RNA, 25 nt, Human
uauagucuuuagccucuuauccaca

SEQ ID NO: 1387558 - RNA, 19 nt, Human
uccaaaccgcuccccaagg

SEQ ID NO: 1387559 - RNA, 21 nt, Human
ugccugcucccuucagcccuu

SEQ ID NO: 1387560 - RNA, 19 nt, Human
uggcggcacccacaggaaa

SEQ ID NO: 1387561 - RNA, 21 nt, Human
uggguuuccaccuccaaaccg

SEQ ID NO: 1387562 - RNA, 22 nt, Human
uugggugaugccugcucccuuc

SEQ ID NO: 1387563 - RNA, 19 nt, Human
aaaaguucucccacauuac

SEQ ID NO: 1387564 - RNA, 20 nt, Human
aaaguucucccacauuacac

SEQ ID NO: 1387565 - RNA, 18 nt, Human
acaaagucaauuuuacgg

SEQ ID NO: 1387566 - RNA, 21 nt, Human
agacuuugccaaacuccucca

SEQ ID NO: 1387567 - RNA, 20 nt, Human
agcgaugagagaacccgaaa

SEQ ID NO: 1387568 - RNA, 18 nt, Human
ccacauuacacuaaagca

SEQ ID NO: 1387569 - RNA, 19 nt, Human
cgacggccuagaggagagg

SEQ ID NO: 1387570 - RNA, 22 nt, Human
cggccuagaggagaggagccaa

SEQ ID NO: 1387571 - RNA, 25 nt, Human
cugacuaggucaaaaauaguuacgc

SEQ ID NO: 1387572 - RNA, 22 nt, Human
gaaacgcuguuccuccuuuucc

SEQ ID NO: 1387573 - RNA, 22 nt, Human
gaugagagaacccgaaagcgac

SEQ ID NO: 1387574 - RNA, 19 nt, Human
gcuagcgcccgggacuugg

SEQ ID NO: 1387575 - RNA, 18 nt, Human
uaacuccuucaaaugcac

SEQ ID NO: 1387576 - RNA, 24 nt, Human
uagaggagaggagccaagaggcgg

SEQ ID NO: 1387577 - RNA, 20 nt, Human
ucccacauuacacuaaagca

SEQ ID NO: 1387578 - RNA, 20 nt, Human
uccuccuuuuccauggagcc

SEQ ID NO: 1387579 - RNA, 20 nt, Human
ucucuuuuaauuaacuccuu

SEQ ID NO: 1387580 - RNA, 20 nt, Human
ugaaaacuuuuucaauugca

SEQ ID NO: 1387581 - RNA, 21 nt, Human
ugagagaacccgaaagcgacg

SEQ ID NO: 1387582 - RNA, 20 nt, Human
ugccaaacuccuccaaguuc

SEQ ID NO: 1387583 - RNA, 18 nt, Human
acaagagggcuguacaaa

SEQ ID NO: 1387584 - RNA, 26 nt, Human
aggcagguaaacccaaguuugccaaa

SEQ ID NO: 1387585 - RNA, 20 nt, Human
caccauggacacgaguggag

SEQ ID NO: 1387586 - RNA, 21 nt, Human
cgaccagcugcugcugcugca

SEQ ID NO: 1387587 - RNA, 22 nt, Human
cgcaguggacaucugcuaaugc

SEQ ID NO: 1387588 - RNA, 21 nt, Human
cggugaggaggaggaggacac

SEQ ID NO: 1387589 - RNA, 18 nt, Human
gagagagacuugucuaca

SEQ ID NO: 1387590 - RNA, 21 nt, Human
gcaguggacaucugcuaaugc

SEQ ID NO: 1387591 - RNA, 22 nt, Human
gccaaacaaaggcaguaacccc

SEQ ID NO: 1387592 - RNA, 21 nt, Human
gccuuugaguugcaggucagg

SEQ ID NO: 1387593 - RNA, 21 nt, Human
gcgaccagcugcugcugcugc

SEQ ID NO: 1387594 - RNA, 22 nt, Human
ggaaguucuguugguaugagag

SEQ ID NO: 1387595 - RNA, 18 nt, Human
ucuacaggcagguaaacc

SEQ ID NO: 1387596 - RNA, 18 nt, Human
ugagaagagcgaggugag

SEQ ID NO: 1387597 - RNA, 21 nt, Human
ugaggaggaggaggacaccau

SEQ ID NO: 1387598 - RNA, 22 nt, Human
ugaggaggaggaggacaccaug

SEQ ID NO: 1387599 - RNA, 24 nt, Human
ugaguggggaugcuauacaagagg

SEQ ID NO: 1387600 - RNA, 19 nt, Human
ugcugcacggugaggagga

SEQ ID NO: 1387601 - RNA, 19 nt, Human
uggaugggacaacgcagug

SEQ ID NO: 1387602 - RNA, 21 nt, Human
ugguucuggaaguaccggaag

SEQ ID NO: 1387603 - RNA, 18 nt, Human
aacacaacuccucuugac

SEQ ID NO: 1387604 - RNA, 19 nt, Human
aagaacaacaacagacugg

SEQ ID NO: 1387605 - RNA, 21 nt, Human
acuggucuguguaccccagac

SEQ ID NO: 1387606 - RNA, 18 nt, Human
agacaggaaaagagaucu

SEQ ID NO: 1387607 - RNA, 21 nt, Human
agacuaggggucacugcaaac

SEQ ID NO: 1387608 - RNA, 27 nt, Human
aggaggagcccauuaagaacaacaacc

SEQ ID NO: 1387609 - RNA, 23 nt, Human
caagacaggaaaagagaucuuga

SEQ ID NO: 1387610 - RNA, 25 nt, Human
caaggaggagcccauuaagaacaac

SEQ ID NO: 1387611 - RNA, 22 nt, Human
caccuccaagacaggaaaagag

SEQ ID NO: 1387612 - RNA, 19 nt, Human
cacugucaauaaggaacac

SEQ ID NO: 1387613 - RNA, 18 nt, Human
cccauuaagaacaacaac

SEQ ID NO: 1387614 - RNA, 21 nt, Human
cccgcggcuggucgcccugga

SEQ ID NO: 1387615 - RNA, 20 nt, Human
ccucuugacacaaacacacc

SEQ ID NO: 1387616 - RNA, 24 nt, Human
cgaggauccgccgcagaagcgcca

SEQ ID NO: 1387617 - RNA, 19 nt, Human
cuccaagacaggaaaagag

SEQ ID NO: 1387618 - RNA, 22 nt, Human
cuggcgagaaugacggggccuu

SEQ ID NO: 1387619 - RNA, 20 nt, Human
gagcccauuaagaacaacaa

SEQ ID NO: 1387620 - RNA, 19 nt, Human
gcccgcggcuggucgcccu

SEQ ID NO: 1387621 - RNA, 21 nt, Human
gcccuggacgccgugggcccc

SEQ ID NO: 1387622 - RNA, 21 nt, Human
guggaggcccgcccaccuaca

SEQ ID NO: 1387623 - RNA, 21 nt, Human
uaagaacaacaacagacuggc

SEQ ID NO: 1387624 - RNA, 24 nt, Human
uaccccagacuaggggucacugca

SEQ ID NO: 1387625 - RNA, 19 nt, Human
uccaagacaggaaaagaga

SEQ ID NO: 1387626 - RNA, 27 nt, Human
uccucuugacacaaacacacacacaau

SEQ ID NO: 1387627 - RNA, 19 nt, Human
ugacguggaggcccgccca

SEQ ID NO: 1387628 - RNA, 24 nt, Human
uuaagaacaacaacagacuggcga

SEQ ID NO: 1387629 - RNA, 23 nt, Human
uucaaggaggagcccauuaagaa

SEQ ID NO: 1387630 - RNA, 26 nt, Human
uugaacacugucaauaaggaacacug

SEQ ID NO: 1387631 - RNA, 24 nt, Human
uugacacaaacacacacacauuuc

SEQ ID NO: 1387632 - RNA, 20 nt, Human
uuucucagauaugacuuuuc

SEQ ID NO: 1387633 - RNA, 19 nt, Human
aaaaucccuccaugcuaac

SEQ ID NO: 1387634 - RNA, 19 nt, Human
acuccacuacccagccaau

SEQ ID NO: 1387635 - RNA, 24 nt, Human
aucaucccucucuccuacaaauuc

SEQ ID NO: 1387636 - RNA, 23 nt, Human
caacacuccacuacccagccaau

SEQ ID NO: 1387637 - RNA, 22 nt, Human
cacuacccagccaaugguagcc

SEQ ID NO: 1387638 - RNA, 20 nt, Human
cacuccacuacccagccaau

SEQ ID NO: 1387639 - RNA, 31 nt, Human; identical to SEQ ID NO: 1309325

SEQ ID NO: 1387640 - RNA, 19 nt, Human
ccaaugguagcccuaaaau

SEQ ID NO: 1387641 - RNA, 19 nt, Human
cgacuaacuccaggcugcc

SEQ ID NO: 1387642 - RNA, 24 nt, Human
cuaaaaucccuccaugcuaacugg

SEQ ID NO: 1387643 - RNA, 25 nt, Human
cuguauauacaccucucgcgauccc

SEQ ID NO: 1387644 - RNA, 21 nt, Human
gcccuaaaaucccuccaugcu

SEQ ID NO: 1387645 - RNA, 21 nt, Human
ggacgagacaaucacgccccu

SEQ ID NO: 1387646 - RNA, 21 nt, Human
uaaaaucccuccaugcuaacu

SEQ ID NO: 1387647 - RNA, 18 nt, Human
ucaaucaucccucucucc

SEQ ID NO: 1387648 - RNA, 19 nt, Human
ucacauacuucucccagca

SEQ ID NO: 1387649 - RNA, 24 nt, Human
ucuccuacaaauuccucugcuaca

SEQ ID NO: 1387650 - RNA, 24 nt, Human
aagagcccagggagguggcugggg

SEQ ID NO: 1387651 - RNA, 26 nt, Human
aaggggaguaaaaaagagcccaggga

SEQ ID NO: 1387652 - RNA, 21 nt, Human
agagaagccagccagaguggg

SEQ ID NO: 1387653 - RNA, 19 nt, Human
agagaggagagagguuugg

SEQ ID NO: 1387654 - RNA, 20 nt, Human
agaugggcgauguggugggg

SEQ ID NO: 1387655 - RNA, 18 nt, Human
aggaauggauagaggggu

SEQ ID NO: 1387656 - RNA, 25 nt, Human
aggagauaguggagggggugggggc

SEQ ID NO: 1387657 - RNA, 22 nt, Human
agggagguggcuggggcgggag

SEQ ID NO: 1387658 - RNA, 20 nt, Human
agggggugggggccaaggug

SEQ ID NO: 1387659 - RNA, 18 nt, Human
agguggcuggggcgggag

SEQ ID NO: 1387660 - RNA, 25 nt, Human
aucagccggggggcugaaggggagu

SEQ ID NO: 1387661 - RNA, 27 nt, Human
caagguggggccacaggaagagagggc

SEQ ID NO: 1387662 - RNA, 19 nt, Human
cagaaccagagauggcauc

SEQ ID NO: 1387663 - RNA, 19 nt, Human
cagaauacaaaauuggggg

SEQ ID NO: 1387664 - RNA, 25 nt, Human
cagccagagugggggcggcaggaga

SEQ ID NO: 1387665 - RNA, 19 nt, Human
ccacaggaagagagggcuc

SEQ ID NO: 1387666 - RNA, 21 nt, Human
cggcaggagauaguggagggg

SEQ ID NO: 1387667 - RNA, 24 nt, Human
cguccguuggucccaccgcacaga

SEQ ID NO: 1387668 - RNA, 19 nt, Human
gaggaauggauagaggggu

SEQ ID NO: 1387669 - RNA, 20 nt, Human
gagggggugggggccaaggu

SEQ ID NO: 1387670 - RNA, 20 nt, Human
gcaggagauaguggaggggg

SEQ ID NO: 1387671 - RNA, 18 nt, Human
gcgguccugggccugggg

SEQ ID NO: 1387672 - RNA, 21 nt, Human
gcgguccugggccugggggac

SEQ ID NO: 1387673 - RNA, 21 nt, Human
ggagagaagccagccagagug

SEQ ID NO: 1387674 - RNA, 20 nt, Human
ggagauaguggagggggugg

SEQ ID NO: 1387675 - RNA, 24 nt, Human
ggagggggugggggccaagguggg

SEQ ID NO: 1387676 - RNA, 18 nt, Human
ggcaggagauaguggagg

SEQ ID NO: 1387677 - RNA, 24 nt, Human
ggcaggagauaguggagggggugg

SEQ ID NO: 1387678 - RNA, 23 nt, Human
ggcaucagccggggggcugaagg

SEQ ID NO: 1387679 - RNA, 22 nt, Human
ggcggggcggggaccucggggc

SEQ ID NO: 1387680 - RNA, 26 nt, Human
ggcuugggcugggagccucugcaaca

SEQ ID NO: 1387681 - RNA, 18 nt, Human
gggccugggggacgggga

SEQ ID NO: 1387682 - RNA, 19 nt, Human
ggggaagagaugggcgaug

SEQ ID NO: 1387683 - RNA, 22 nt, Human
ggggugggggccaagguggggc

SEQ ID NO: 1387684 - RNA, 25 nt, Human
uaaaaaagagcccagggagguggcu

SEQ ID NO: 1387685 - RNA, 22 nt, Human
uaguggagggggugggggccaa

SEQ ID NO: 1387686 - RNA, 22 nt, Human
ugaggagagggagagaaacuga

SEQ ID NO: 1387687 - RNA, 18 nt, Human
uggagggggugggggcca

SEQ ID NO: 1387688 - RNA, 21 nt, Human
uggagggggugggggccaagg

SEQ ID NO: 1387689 - RNA, 24 nt, Human
uggagggggugggggccaaggugg

SEQ ID NO: 1387690 - RNA, 20 nt, Human
uggggcgggaggaauggaua

SEQ ID NO: 1387691 - RNA, 20 nt, Human
uggggggacugacaggggcg

SEQ ID NO: 1387692 - RNA, 23 nt, Human
acccaggccacaggugguggagc

SEQ ID NO: 1387693 - RNA, 23 nt, Human
agagaagccaccccaacaguggg

SEQ ID NO: 1387694 - RNA, 21 nt, Human
aggccccaggccacccuccag

SEQ ID NO: 1387695 - RNA, 24 nt, Human
agggccacagguggcagcggcggg

SEQ ID NO: 1387696 - RNA, 21 nt, Human
agguggcagcggcgggcaggc

SEQ ID NO: 1387697 - RNA, 22 nt, Human
cacaggccccaggccacccucc

SEQ ID NO: 1387698 - RNA, 23 nt, Human
cacaguucacuauccacaggccc

SEQ ID NO: 1387699 - RNA, 19 nt, Human
cagagcugacucccaggcu

SEQ ID NO: 1387700 - RNA, 21 nt, Human
cagcggcgggcaggcuggggc

SEQ ID NO: 1387701 - RNA, 22 nt, Human
cagcggcgggcaggcuggggcc

SEQ ID NO: 1387702 - RNA, 20 nt, Human
ccacaggccccaggccaccc

SEQ ID NO: 1387703 - RNA, 18 nt, Human
cccaggccacccuccaga

SEQ ID NO: 1387704 - RNA, 18 nt, Human
cccuccagagcugacucc

SEQ ID NO: 1387705 - RNA, 19 nt, Human
ccuccagagcugacuccca

SEQ ID NO: 1387706 - RNA, 18 nt, Human
ccucggguuccucaucau

SEQ ID NO: 1387707 - RNA, 22 nt, Human
cucgggggcagguggggugcuc

SEQ ID NO: 1387708 - RNA, 22 nt, Human
cugacucccaggcuacuguccc

SEQ ID NO: 1387709 - RNA, 23 nt, Human
cuggggccggccagcggggucgc

SEQ ID NO: 1387710 - RNA, 19 nt, Human
gaagccaccccaacagugg

SEQ ID NO: 1387711 - RNA, 24 nt, Human
gagaagccaccccaacagugggcc

SEQ ID NO: 1387712 - RNA, 24 nt, Human
gcagguggggugcuccgcagcccu

SEQ ID NO: 1387713 - RNA, 18 nt, Human
gcugggucucgggggcag

SEQ ID NO: 1387714 - RNA, 23 nt, Human
ggagagaagccaccccaacagug

SEQ ID NO: 1387715 - RNA, 19 nt, Human
ggcuaugggaggaggaggg

SEQ ID NO: 1387716 - RNA, 19 nt, Human
ggcugggucucgggggcag

SEQ ID NO: 1387717 - RNA, 24 nt, Human
gggcagcguggggcugggucucgg

SEQ ID NO: 1387718 - RNA, 19 nt, Human
ucgggggcagguggggugc

SEQ ID NO: 1387719 - RNA, 24 nt, Human
ucucgggggcagguggggugcucc

SEQ ID NO: 1387720 - RNA, 21 nt, Human
ugagugccagguggcacaggg

SEQ ID NO: 1387721 - RNA, 18 nt, Human
ugggcagcguggggcugg

SEQ ID NO: 1387722 - RNA, 19 nt, Human
uuacuccaguugccugagu

SEQ ID NO: 1387723 - RNA, 24 nt, Human
agaagaggcggcuugcagggcugg

SEQ ID NO: 1387724 - RNA, 24 nt, Human
agagagcucuguccuucucccuuc

SEQ ID NO: 1387725 - RNA, 18 nt, Human
caccuguccacaccuguc

SEQ ID NO: 1387726 - RNA, 24 nt, Human
ccugucacugggccuuucccuggg

SEQ ID NO: 1387727 - RNA, 23 nt, Human
cgagaagaggcggcuugcagggc

SEQ ID NO: 1387728 - RNA, 22 nt, Human
gcagggcuggcaccuguccaca

SEQ ID NO: 1387729 - RNA, 22 nt, Human
gcuggcaccuguccacaccugu

SEQ ID NO: 1387730 - RNA, 24 nt, Human
uaugugcagggccugugcaggagc

SEQ ID NO: 1387731 - RNA, 21 nt, Human
uccuucucccuucuaccgaga

SEQ ID NO: 1387732 - RNA, 21 nt, Human
ugagugggagcagaugcccuc

SEQ ID NO: 1387733 - RNA, 20 nt, Human
uugcagggcuggcaccuguc

SEQ ID NO: 1387734 - RNA, 19 nt, Human
aagagcgaaguguggcaca

SEQ ID NO: 1387735 - RNA, 23 nt, Human
cacgcauccguggaguccagagc

SEQ ID NO: 1387736 - RNA, 26 nt, Human
cauagcccacauuccucugcccacgc

SEQ ID NO: 1387737 - RNA, 19 nt, Human
ggaguccagagcccagaaa

SEQ ID NO: 1387738 - RNA, 20 nt, Human
ggcugaucagcucaugcaga

SEQ ID NO: 1387739 - RNA, 21 nt, Human
guccagagcccagaaagccuc

SEQ ID NO: 1387740 - RNA, 20 nt, Human
uauuaugacuacauagccca

SEQ ID NO: 1387741 - RNA, 23 nt, Human
ucaagagcgaaguguggcacaga

SEQ ID NO: 1387742 - RNA, 21 nt, Human
agaguucugggaccucucagg

SEQ ID NO: 1387743 - RNA, 19 nt, Human
cagaguucugggaccucuc

SEQ ID NO: 1387744 - RNA, 22 nt, Human
cucucagggaaccaagcaguag

SEQ ID NO: 1387745 - RNA, 18 nt, Human
uaagaaaagagaaaaaua

SEQ ID NO: 1387746 - RNA, 24 nt, Human
ugauagaucugcaagaaaaaucuc

SEQ ID NO: 1387747 - RNA, 25 nt, Human
ugccuggaagagaacuuuggauuuc

SEQ ID NO: 1387748 - RNA, 21 nt, Human
uggaauuauuaaaaaaugaaa

SEQ ID NO: 1387749 - RNA, 23 nt, Human
aaaaagaauccuccaaaagugaa

SEQ ID NO: 1387750 - RNA, 21 nt, Human
aaaacucaaccagccagccuc

SEQ ID NO: 1387751 - RNA, 21 nt, Human
aaaccagcagugcuccaaggc

SEQ ID NO: 1387752 - RNA, 21 nt, Human
agaaaauaacaaaacucaacc

SEQ ID NO: 1387753 - RNA, 23 nt, Human
agaaaauaacaaaacucaaccag

SEQ ID NO: 1387754 - RNA, 24 nt, Human
agacagauaggaauuaggaucagg

SEQ ID NO: 1387755 - RNA, 23 nt, Human
agacagcuggguucagugaagug

SEQ ID NO: 1387756 - RNA, 22 nt, Human
agagccugcgagaaaaacaggc

SEQ ID NO: 1387757 - RNA, 18 nt, Human
agcacugaagagcaagau

SEQ ID NO: 1387758 - RNA, 19 nt, Human
agcccccauccagggacag

SEQ ID NO: 1387759 - RNA, 19 nt, Human
aggaacacagaucaguaca

SEQ ID NO: 1387760 - RNA, 23 nt, Human
aggacagaauuauagccccaggu

SEQ ID NO: 1387761 - RNA, 24 nt, Human
auagagccugcgagaaaaacaggc

SEQ ID NO: 1387762 - RNA, 20 nt, Human
aucaaagccucaaccuuugc

SEQ ID NO: 1387763 - RNA, 21 nt, Human
caaaaacacuuucccuuggga

SEQ ID NO: 1387764 - RNA, 20 nt, Human
caaaaagaauccuccaaaag

SEQ ID NO: 1387765 - RNA, 21 nt, Human
cacagccaaaguccaucaucc

SEQ ID NO: 1387766 - RNA, 21 nt, Human
cagagcucaaaugcagaccgu

SEQ ID NO: 1387767 - RNA, 24 nt, Human
cagcacugaagagcaagaucuuca

SEQ ID NO: 1387768 - RNA, 20 nt, Human
cagcagugcuccaaggcaga

SEQ ID NO: 1387769 - RNA, 25 nt, Human
cauuauauacaaaaacacuuucccu

SEQ ID NO: 1387770 - RNA, 24 nt, Human
ccaauaauuaagaaaaaaaccauc

SEQ ID NO: 1387771 - RNA, 20 nt, Human
ccccacauaugcuuccaacc

SEQ ID NO: 1387772 - RNA, 19 nt, Human
ccuggcucacagccaaagu

SEQ ID NO: 1387773 - RNA, 23 nt, Human
cgagaaaaacaggcaauuuggga

SEQ ID NO: 1387774 - RNA, 20 nt, Human
cgccagagacucacucaggg

SEQ ID NO: 1387775 - RNA, 26 nt, Human
cucacagccaaaguccaucauccauu

SEQ ID NO: 1387776 - RNA, 19 nt, Human
cucagggacagaaaauggc

SEQ ID NO: 1387777 - RNA, 21 nt, Human
cuccaaaagugaaaaaauaca

SEQ ID NO: 1387778 - RNA, 19 nt, Human
cuccccacauaugcuucca

SEQ ID NO: 1387779 - RNA, 20 nt, Human
gaaaaaaaccaucaaagccu

SEQ ID NO: 1387780 - RNA, 20 nt, Human
gaaaauaacaaaacucaacc

SEQ ID NO: 1387781 - RNA, 23 nt, Human
gaacggaauagagccugcgagaa

SEQ ID NO: 1387782 - RNA, 22 nt, Human
gacaagaaccauccuaggccug

SEQ ID NO: 1387783 - RNA, 20 nt, Human
gacagaauuauagccccagg

SEQ ID NO: 1387784 - RNA, 25 nt, Human
gacgccagagacucacucagggaca

SEQ ID NO: 1387785 - RNA, 24 nt, Human
gauaggaauuaggaucaggaacac

SEQ ID NO: 1387786 - RNA, 20 nt, Human
gccagaacaaaaccuuuggc

SEQ ID NO: 1387787 - RNA, 22 nt, Human
ggaauagagccugcgagaaaaa

SEQ ID NO: 1387788 - RNA, 25 nt, Human
uaagaaaaaaaccaucaaagccuca

SEQ ID NO: 1387789 - RNA, 22 nt, Human
uaggaauuaggaucaggaacac

SEQ ID NO: 1387790 - RNA, 22 nt, Human
uauaaaaccagcagugcuccaa

SEQ ID NO: 1387791 - RNA, 19 nt, Human
uauacagaaaauaacaaaa

SEQ ID NO: 1387792 - RNA, 22 nt, Human
uauagcaccauuggaaaacaaa

SEQ ID NO: 1387793 - RNA, 23 nt, Human
uauagccccaggugaagacuagg

SEQ ID NO: 1387794 - RNA, 22 nt, Human
uaucucaaccuuucuauacaga

SEQ ID NO: 1387795 - RNA, 22 nt, Human
ucaaagccucaaccuuugcuua

SEQ ID NO: 1387796 - RNA, 27 nt, Human
ucaaccuuucuauacagaaaauaacaa

SEQ ID NO: 1387797 - RNA, 21 nt, Human
ucagccaauaauuaagaaaaa

SEQ ID NO: 1387798 - RNA, 20 nt, Human
ucagggacagaaaauggcag

SEQ ID NO: 1387799 - RNA, 22 nt, Human
ucagugaaguguuugaaaacag

SEQ ID NO: 1387800 - RNA, 19 nt, Human
uggaaaacaaaggccuaca

SEQ ID NO: 1387801 - RNA, 19 nt, Human
uggauauaggacaagaacc

SEQ ID NO: 1387802 - RNA, 22 nt, Human
uggcuacuuucaaaccagagcu

SEQ ID NO: 1387803 - RNA, 23 nt, Human
uuagcaucuuuauuugagaaguc

SEQ ID NO: 1387804 - RNA, 21 nt, Human
uucagaguucuuuuuccagga

SEQ ID NO: 1387805 - RNA, 23 nt, Human
uugggaggagggcugugcccccu

SEQ ID NO: 1387806 - RNA, 19 nt, Human
uuucagaguucuuuuucca

SEQ ID NO: 1387807 - RNA, 19 nt, Human
uuuguagcccccauccagg

SEQ ID NO: 1387808 - RNA, 19 nt, Human
aacaagagaauucugggga

SEQ ID NO: 1387809 - RNA, 18 nt, Human
aagaccucuagagaauca

SEQ ID NO: 1387810 - RNA, 26 nt, Human
aagcaauucucgugccucagccuccu

SEQ ID NO: 1387811 - RNA, 22 nt, Human
aagcagucaaagagaggguggc

SEQ ID NO: 1387812 - RNA, 23 nt, Human
aaggacuccauguguccaguggg

SEQ ID NO: 1387813 - RNA, 27 nt, Human
aaggacuccauguguccaguggggagc

SEQ ID NO: 1387814 - RNA, 25 nt, Human
aaggcugaucucagcccccuccaca

SEQ ID NO: 1387815 - RNA, 22 nt, Human
aagugcccacgccuggccucac

SEQ ID NO: 1387816 - RNA, 18 nt, Human
aagugcugggguuacagg

SEQ ID NO: 1387817 - RNA, 19 nt, Human
aagugcugggguuacaggc

SEQ ID NO: 1387818 - RNA, 23 nt, Human
aagugcugggguuacaggccuga

SEQ ID NO: 1387819 - RNA, 26 nt, Human
aagugcugggguuacaggccugagcu

SEQ ID NO: 1387820 - RNA, 20 nt, Human
aaugggauuuuccaaggccc

SEQ ID NO: 1387821 - RNA, 18 nt, Human
acaagagaauucugggga

SEQ ID NO: 1387822 - RNA, 24 nt, Human
acacaacccagagacgagggaacc

SEQ ID NO: 1387823 - RNA, 20 nt, Human
acccaugaugaccaaaucuc

SEQ ID NO: 1387824 - RNA, 21 nt, Human
accccgcugcccaggucccca

SEQ ID NO: 1387825 - RNA, 18 nt, Human
acccugugcucgucucag

SEQ ID NO: 1387826 - RNA, 18 nt, Human
acgggguuucgccauguu

SEQ ID NO: 1387827 - RNA, 23 nt, Human
acgggguuucgccauguuggcca

SEQ ID NO: 1387828 - RNA, 24 nt, Human
acgggguuucgccauguuggccag

SEQ ID NO: 1387829 - RNA, 18 nt, Human
acugaggggcaucgcagg

SEQ ID NO: 1387830 - RNA, 24 nt, Human
agcaauucucgugccucagccucc

SEQ ID NO: 1387831 - RNA, 18 nt, Human
agccccgcugaaugggau

SEQ ID NO: 1387832 - RNA, 20 nt, Human
aggaccacccccuccaccuc

SEQ ID NO: 1387833 - RNA, 20 nt, Human
aggagcuuccggagcugggc

SEQ ID NO: 1387834 - RNA, 20 nt, Human
aggcagcccucuagagcucc

SEQ ID NO: 1387835 - RNA, 20 nt, Human
aggcagggaggcugcaaagg

SEQ ID NO: 1387836 - RNA, 20 nt, Human
aggcagggccuugaagccuc

SEQ ID NO: 1387837 - RNA, 21 nt, Human
aggccuccccaccccacuccc

SEQ ID NO: 1387838 - RNA, 20 nt, Human
aggcucuucaccccacuccc

SEQ ID NO: 1387839 - RNA, 21 nt, Human
agggcuaagagcauggcccag

SEQ ID NO: 1387840 - RNA, 21 nt, Human
aggguaaagggcccacgaugg

SEQ ID NO: 1387841 - RNA, 24 nt, Human
aggugauccgcccaccucagccuc

SEQ ID NO: 1387842 - RNA, 23 nt, Human
agguggggucagaggccccaggg

SEQ ID NO: 1387843 - RNA, 24 nt, Human
agguggggucagaggccccagggc

SEQ ID NO: 1387844 - RNA, 18 nt, Human
aguagcugggauuacagg

SEQ ID NO: 1387845 - RNA, 24 nt, Human
agucaucaccucucugacucuaga

SEQ ID NO: 1387846 - RNA, 19 nt, Human
agucugaguuggugagacc

SEQ ID NO: 1387847 - RNA, 21 nt, Human
agugcucaaaguccccuaccu

SEQ ID NO: 1387848 - RNA, 24 nt, Human
agugcugggguuacaggccugagc

SEQ ID NO: 1387849 - RNA, 20 nt, Human
aguucaguggugcgaucuug

SEQ ID NO: 1387850 - RNA, 21 nt, Human
aucagugaccgcaccugaagu

SEQ ID NO: 1387851 - RNA, 18 nt, Human
aucauauuuucacuaagc

SEQ ID NO: 1387852 - RNA, 22 nt, Human
augaaggaaaaggccaucuaca

SEQ ID NO: 1387853 - RNA, 24 nt, Human
auuuuugcauguuuaguagagacg

SEQ ID NO: 1387854 - RNA, 18 nt, Human
caaagaggcuccaaggac

SEQ ID NO: 1387855 - RNA, 23 nt, Human
caaagcagcagugcucaaagucc

SEQ ID NO: 1387856 - RNA, 24 nt, Human
caaccacuccugauucccuguccc

SEQ ID NO: 1387857 - RNA, 18 nt, Human
caacccagagacgacugg

SEQ ID NO: 1387858 - RNA, 23 nt, Human
caagggacccccuguguccagug

SEQ ID NO: 1387859 - RNA, 18 nt, Human
caaggucagcacaaaacc

SEQ ID NO: 1387860 - RNA, 20 nt, Human
cacaacccagagacgacugg

SEQ ID NO: 1387861 - RNA, 19 nt, Human
cacaaugacccucagugac

SEQ ID NO: 1387862 - RNA, 20 nt, Human
cacagcaagucucucaucau

SEQ ID NO: 1387863 - RNA, 19 nt, Human
cacagguggggucagaggc

SEQ ID NO: 1387864 - RNA, 18 nt, Human
caccaaggaaaaaacaag

SEQ ID NO: 1387865 - RNA, 18 nt, Human
caccaaggaaaaaacaag

SEQ ID NO: 1387866 - RNA, 23 nt, Human
caccaaggaaaaaacaagagaau

SEQ ID NO: 1387867 - RNA, 24 nt, Human
caccccacucccagacgaaggacu

SEQ ID NO: 1387868 - RNA, 26 nt, Human
cacccccuccaccccaucagggucca

SEQ ID NO: 1387869 - RNA, 24 nt, Human
caccucagccucccgaagugcugg

SEQ ID NO: 1387870 - RNA, 19 nt, Human
caccuggaggcaguugggg

SEQ ID NO: 1387871 - RNA, 24 nt, Human
caccuggcgagugcugagggaugc

SEQ ID NO: 1387872 - RNA, 24 nt, Human
cagaaccaagguccagcagccauc

SEQ ID NO: 1387873 - RNA, 20 nt, Human
cagaagugcccacgccuggc

SEQ ID NO: 1387874 - RNA, 19 nt, Human
cagacucugccccaucagg

SEQ ID NO: 1387875 - RNA, 19 nt, Human
cagcagcugagccagccac

SEQ ID NO: 1387876 - RNA, 27 nt, Human
cagcaggcagggccuugaagccuccag

SEQ ID NO: 1387877 - RNA, 20 nt, Human
cagcagggagggaacagagc

SEQ ID NO: 1387878 - RNA, 24 nt, Human
cagcauggaacccucaaugcauag

SEQ ID NO: 1387879 - RNA, 20 nt, Human
cagccuccugaguagcuggg

SEQ ID NO: 1387880 - RNA, 27 nt, Human
cagcugagucugcugauccaacugugc

SEQ ID NO: 1387881 - RNA, 23 nt, Human
caggaauccacagcaagucucuc

SEQ ID NO: 1387882 - RNA, 21 nt, Human
cagggaggccacagaggucag

SEQ ID NO: 1387883 - RNA, 21 nt, Human
cagggccagacucugccccau

SEQ ID NO: 1387884 - RNA, 22 nt, Human
cagggccuggugucgggguccc

SEQ ID NO: 1387885 - RNA, 27 nt, Human
caggucccaaagcagcagugcucaaag

SEQ ID NO: 1387886 - RNA, 19 nt, Human
caggugcccgccaccgugc

SEQ ID NO: 1387887 - RNA, 22 nt, Human
caguggcucuuccagggccaga

SEQ ID NO: 1387888 - RNA, 20 nt, Human
caguggugcgaucuuggcuc

SEQ ID NO: 1387889 - RNA, 22 nt, Human
cauucggggacaggauccgccc

SEQ ID NO: 1387890 - RNA, 20 nt, Human
ccaaggaaaaaacaagagaa

SEQ ID NO: 1387891 - RNA, 21 nt, Human
ccaaggaaaaaacaagagaau

SEQ ID NO: 1387892 - RNA, 24 nt, Human
ccaaggacaaacccccugucaggu

SEQ ID NO: 1387893 - RNA, 22 nt, Human
ccaaggcccagaaccaaggucc

SEQ ID NO: 1387894 - RNA, 21 nt, Human
ccacccccuccaccucaccca

SEQ ID NO: 1387895 - RNA, 24 nt, Human
ccacuugucaguacauuuuauuuc

SEQ ID NO: 1387896 - RNA, 24 nt, Human
ccaggccuccggcagcggcccaug

SEQ ID NO: 1387897 - RNA, 19 nt, Human
ccaguggccagcuggccag

SEQ ID NO: 1387898 - RNA, 22 nt, Human
ccagugggucccacaaugaccc

SEQ ID NO: 1387899 - RNA, 23 nt, Human
ccaucuacaaggucagcacaaaa

SEQ ID NO: 1387900 - RNA, 21 nt, Human
ccauggaugcuggguccuggg

SEQ ID NO: 1387901 - RNA, 22 nt, Human
ccauguuggccaggauggucuc

SEQ ID NO: 1387902 - RNA, 23 nt, Human
ccauguuggccaggauggucucg

SEQ ID NO: 1387903 - RNA, 23 nt, Human
cccaaccgccaugucaccuucuu

SEQ ID NO: 1387904 - RNA, 22 nt, Human
cccaagccccuuugaccaagag

SEQ ID NO: 1387905 - RNA, 22 nt, Human
cccacaaugacccucagugacc

SEQ ID NO: 1387906 - RNA, 18 nt, Human
cccaccccacucccagac

SEQ ID NO: 1387907 - RNA, 18 nt, Human
cccacuaugaauagaggc

SEQ ID NO: 1387908 - RNA, 20 nt, Human
cccagaaccaagguccagca

SEQ ID NO: 1387909 - RNA, 23 nt, Human
cccaggaauccacagcaagucuc

SEQ ID NO: 1387910 - RNA, 21 nt, Human
cccagguccccacuucccagg

SEQ ID NO: 1387911 - RNA, 21 nt, Human
ccccaagccccuuugaccaag

SEQ ID NO: 1387912 - RNA, 25 nt, Human
ccccaccccacucccagacgaagga

SEQ ID NO: 1387913 - RNA, 22 nt, Human
ccccacucccagacaagggacc

SEQ ID NO: 1387914 - RNA, 20 nt, Human
ccccauggaguugcuguggg

SEQ ID NO: 1387915 - RNA, 23 nt, Human
cccccuccaccccaucagggucc

SEQ ID NO: 1387916 - RNA, 20 nt, Human
cccccuccaccucacccaua

SEQ ID NO: 1387917 - RNA, 24 nt, Human
cccccugacccaacccaugaugac

SEQ ID NO: 1387918 - RNA, 22 nt, Human
ccccuaccuaacugcccaaggg

SEQ ID NO: 1387919 - RNA, 22 nt, Human
ccccugacccaacccaugauga

SEQ ID NO: 1387920 - RNA, 22 nt, Human
cccuaugcuuagccuucccucc

SEQ ID NO: 1387921 - RNA, 19 nt, Human
cccuccaccccaucagggu

SEQ ID NO: 1387922 - RNA, 24 nt, Human
cccucuugucgcccaggcuggagu

SEQ ID NO: 1387923 - RNA, 19 nt, Human
cccuguguccagugggucc

SEQ ID NO: 1387924 - RNA, 20 nt, Human
cccuguguccaguggguccc

SEQ ID NO: 1387925 - RNA, 19 nt, Human
ccgaagugcugggguuaca

SEQ ID NO: 1387926 - RNA, 24 nt, Human
ccgaagugcugggguuacaggccu

SEQ ID NO: 1387927 - RNA, 25 nt, Human
ccgcccaccucagccucccgaagug

SEQ ID NO: 1387928 - RNA, 23 nt, Human
ccgucgugugguugcagggcugu

SEQ ID NO: 1387929 - RNA, 22 nt, Human
ccuaugcuuagccuucccucca

SEQ ID NO: 1387930 - RNA, 24 nt, Human
ccuaugcuuagccuucccuccaga

SEQ ID NO: 1387931 - RNA, 24 nt, Human
ccuccaccucacccauaggaucuc

SEQ ID NO: 1387932 - RNA, 24 nt, Human
ccuccaggcagcccucuagagcuc

SEQ ID NO: 1387933 - RNA, 20 nt, Human
ccuccccaccccacucccag

SEQ ID NO: 1387934 - RNA, 22 nt, Human
ccuccccaccccacucccagac

SEQ ID NO: 1387935 - RNA, 23 nt, Human
ccuccccaccccacucccagacg

SEQ ID NO: 1387936 - RNA, 21 nt, Human
ccuccggcagauaaaggagga

SEQ ID NO: 1387937 - RNA, 23 nt, Human
ccucugucauaagccugggcagg

SEQ ID NO: 1387938 - RNA, 18 nt, Human
ccucuguccucguggaga

SEQ ID NO: 1387939 - RNA, 24 nt, Human
ccugaccucaggugauccgcccac

SEQ ID NO: 1387940 - RNA, 22 nt, Human
ccugaguagcugggauuacagg

SEQ ID NO: 1387941 - RNA, 23 nt, Human
ccugaguagcugggauuacaggu

SEQ ID NO: 1387942 - RNA, 24 nt, Human
ccugaguagcugggauuacaggug

SEQ ID NO: 1387943 - RNA, 26 nt, Human
ccugcacugcagugaugaggcuggga

SEQ ID NO: 1387944 - RNA, 20 nt, Human
ccuggguucaagcaauucuc

SEQ ID NO: 1387945 - RNA, 20 nt, Human
ccuggguucaagcaauucuc

SEQ ID NO: 1387946 - RNA, 18 nt, Human
ccuugccccugggugggc

SEQ ID NO: 1387947 - RNA, 19 nt, Human
cgaaggacuccaugugucc

SEQ ID NO: 1387948 - RNA, 19 nt, Human
cgagugcugagggaugcua

SEQ ID NO: 1387949 - RNA, 22 nt, Human
cgccauguuggccaggaugguc

SEQ ID NO: 1387950 - RNA, 24 nt, Human
cgccauguuggccaggauggucuc

SEQ ID NO: 1387951 - RNA, 21 nt, Human
cggcccaggaauccacagcaa

SEQ ID NO: 1387952 - RNA, 22 nt, Human
cggcucaggucccugugguagc

SEQ ID NO: 1387953 - RNA, 24 nt, Human
cgggguuucgccauguuggccagg

SEQ ID NO: 1387954 - RNA, 24 nt, Human
cgugccucagccuccugaguagcu

SEQ ID NO: 1387955 - RNA, 22 nt, Human
cguucuucuacugaggggcauc

SEQ ID NO: 1387956 - RNA, 22 nt, Human
cuaccaggcccaaccgccaugu

SEQ ID NO: 1387957 - RNA, 20 nt, Human
cuacugaggggcaucgcagg

SEQ ID NO: 1387958 - RNA, 20 nt, Human
cuaggaccaugaagaugccc

SEQ ID NO: 1387959 - RNA, 19 nt, Human
cucacacacaacccagaga

SEQ ID NO: 1387960 - RNA, 19 nt, Human
cucacagugcccugguccc

SEQ ID NO: 1387961 - RNA, 19 nt, Human
cucacugcaaccuccacug

SEQ ID NO: 1387962 - RNA, 24 nt, Human
cucagccuccugaguagcugggau

SEQ ID NO: 1387963 - RNA, 19 nt, Human
cuccaaggacaaacccccu

SEQ ID NO: 1387964 - RNA, 23 nt, Human
cuccaaggacaaacccccuguca

SEQ ID NO: 1387965 - RNA, 25 nt, Human
cuccagagaucagacugccugcacu

SEQ ID NO: 1387966 - RNA, 21 nt, Human
cucccagacgaaggacuccau

SEQ ID NO: 1387967 - RNA, 24 nt, Human
cucccucuugucgcccaggcugga

SEQ ID NO: 1387968 - RNA, 25 nt, Human
cucgugccucagccuccugaguagc

SEQ ID NO: 1387969 - RNA, 20 nt, Human
cucucaccggccagcagcug

SEQ ID NO: 1387970 - RNA, 21 nt, Human
cucugcuagccaggcccuacu

SEQ ID NO: 1387971 - RNA, 19 nt, Human
cucugucauaagccugggc

SEQ ID NO: 1387972 - RNA, 19 nt, Human
cucuugucgcccaggcugg

SEQ ID NO: 1387973 - RNA, 21 nt, Human
cugaggaccacccccuccacc

SEQ ID NO: 1387974 - RNA, 21 nt, Human
cugaguagcugggauuacagg

SEQ ID NO: 1387975 - RNA, 19 nt, Human
cugccaggccuccggcagc

SEQ ID NO: 1387976 - RNA, 28 nt, Human
cugccuuguugcuggggugucuccugac

SEQ ID NO: 1387977 - RNA, 20 nt, Human
cugcucauacuuaguaauga

SEQ ID NO: 1387978 - RNA, 18 nt, Human
cugcugccccagcucagc

SEQ ID NO: 1387979 - RNA, 22 nt, Human
cuggaccagucgcugccucucu

SEQ ID NO: 1387980 - RNA, 22 nt, Human
cuggcuggcuggcuggggcugc

SEQ ID NO: 1387981 - RNA, 20 nt, Human
cuuuugggcugggcuccaga

SEQ ID NO: 1387982 - RNA, 18 nt, Human
gaaccaagguccagcagc

SEQ ID NO: 1387983 - RNA, 21 nt, Human
gaacccucaaugcauagcccu

SEQ ID NO: 1387984 - RNA, 20 nt, Human
gaaggcucuucaccccacuc

SEQ ID NO: 1387985 - RNA, 22 nt, Human
gacaccuuugcugucaaaugag

SEQ ID NO: 1387986 - RNA, 20 nt, Human
gaccaggccccccugaccca

SEQ ID NO: 1387987 - RNA, 23 nt, Human
gaccccgcugcccagguccccac

SEQ ID NO: 1387988 - RNA, 24 nt, Human
gaccucaggugauccgcccaccuc

SEQ ID NO: 1387989 - RNA, 18 nt, Human
gacuugguccuggagaac

SEQ ID NO: 1387990 - RNA, 19 nt, Human
gagaaucacccccuccacc

SEQ ID NO: 1387991 - RNA, 21 nt, Human
gagaaucacccccuccacccc

SEQ ID NO: 1387992 - RNA, 24 nt, Human
gagacgggguuucgccauguuggc

SEQ ID NO: 1387993 - RNA, 19 nt, Human
gaggaccacccccuccacc

SEQ ID NO: 1387994 - RNA, 20 nt, Human
gaggagccucgucagcaugg

SEQ ID NO: 1387995 - RNA, 19 nt, Human
gagggaaaacagcagccag

SEQ ID NO: 1387996 - RNA, 21 nt, Human
gaguccagcguagcacagggc

SEQ ID NO: 1387997 - RNA, 19 nt, Human
gaguugcuguggggaugaa

SEQ ID NO: 1387998 - RNA, 20 nt, Human
gaucucugucccaguggcuc

SEQ ID NO: 1387999 - RNA, 19 nt, Human
gauguugccuugccccugg

SEQ ID NO: 1388000 - RNA, 18 nt, Human
gauuacaggugcccgcca

SEQ ID NO: 1388001 - RNA, 24 nt, Human
gauuacaggugcccgccaccgugc

SEQ ID NO: 1388002 - RNA, 22 nt, Human
gcaaccuccacugccuggguuc

SEQ ID NO: 1388003 - RNA, 21 nt, Human
gcacugacacgggcagcucug

SEQ ID NO: 1388004 - RNA, 19 nt, Human
gcacugcacagggcagggc

SEQ ID NO: 1388005 - RNA, 19 nt, Human
gcagcaggcagggccuuga

SEQ ID NO: 1388006 - RNA, 22 nt, Human
gcagcugagccagccacccaga

SEQ ID NO: 1388007 - RNA, 21 nt, Human
gcagggccuggugucgggguc

SEQ ID NO: 1388008 - RNA, 21 nt, Human
gcccaagggcagaaggcucuu

SEQ ID NO: 1388009 - RNA, 20 nt, Human
gcccaggcuggaguucagug

SEQ ID NO: 1388010 - RNA, 26 nt, Human
gcccccuccacagugugggcggccug

SEQ ID NO: 1388011 - RNA, 20 nt, Human
gcccgucgugugguugcagg

SEQ ID NO: 1388012 - RNA, 23 nt, Human
gcccucuagagcuccuucauuuu

SEQ ID NO: 1388013 - RNA, 29 nt, Human
gccuccccaccccacucccagacgaagga

SEQ ID NO: 1388014 - RNA, 18 nt, Human
gccucucaccggccagca

SEQ ID NO: 1388015 - RNA, 19 nt, Human
gccuggguucaagcaauuc

SEQ ID NO: 1388016 - RNA, 19 nt, Human
gcggggucccagcuuaggg

SEQ ID NO: 1388017 - RNA, 26 nt, Human
gcucaaaguccccuaccuaacugccc

SEQ ID NO: 1388018 - RNA, 22 nt, Human
gcucuuccagggccagacucug

SEQ ID NO: 1388019 - RNA, 21 nt, Human
gcugagccagccacccagaaa

SEQ ID NO: 1388020 - RNA, 18 nt, Human
gcugcgacgcagcugggc

SEQ ID NO: 1388021 - RNA, 20 nt, Human
gcuggcuggcuggcuggcug

SEQ ID NO: 1388022 - RNA, 22 nt, Human
gcuuccggagcugggcaguauu

SEQ ID NO: 1388023 - RNA, 18 nt, Human
ggaaaacagcagccaggg

SEQ ID NO: 1388024 - RNA, 19 nt, Human
ggacaggauccgccccaug

SEQ ID NO: 1388025 - RNA, 24 nt, Human
ggauggucucgaacuccugaccuc

SEQ ID NO: 1388026 - RNA, 21 nt, Human
ggcaaagaggcuccaaggaca

SEQ ID NO: 1388027 - RNA, 21 nt, Human
ggcaggagggaaaacagcagc

SEQ ID NO: 1388028 - RNA, 22 nt, Human
ggcagggaggccacagagguca

SEQ ID NO: 1388029 - RNA, 18 nt, Human
ggcagggccuggugucgg

SEQ ID NO: 1388030 - RNA, 24 nt, Human
ggccuccccaccccacucccagac

SEQ ID NO: 1388031 - RNA, 25 nt, Human
ggccuggugucggggucccaguggg

SEQ ID NO: 1388032 - RNA, 23 nt, Human
gggaccaagcuuugggcacagac

SEQ ID NO: 1388033 - RNA, 22 nt, Human
gggaggccacagaggucagggc

SEQ ID NO: 1388034 - RNA, 21 nt, Human
gggcacagacuuggacugagg

SEQ ID NO: 1388035 - RNA, 21 nt, Human
gggcagggccuggugucgggg

SEQ ID NO: 1388036 - RNA, 18 nt, Human
gggcuucguuuuccugga

SEQ ID NO: 1388037 - RNA, 23 nt, Human
gggguuucgccauguuggccagg

SEQ ID NO: 1388038 - RNA, 18 nt, Human
ggucagaggccccagggc

SEQ ID NO: 1388039 - RNA, 18 nt, Human
gguccagaaccccaggga

SEQ ID NO: 1388040 - RNA, 23 nt, Human
guagagacgggguuucgccaugu

SEQ ID NO: 1388041 - RNA, 24 nt, Human
gugauccgcccaccucagccuccc

SEQ ID NO: 1388042 - RNA, 22 nt, Human
gugccucagccuccugaguagc

SEQ ID NO: 1388043 - RNA, 22 nt, Human
guggaggacgguggacuccaca

SEQ ID NO: 1388044 - RNA, 23 nt, Human
uaaaggaggacggcaguguugcg

SEQ ID NO: 1388045 - RNA, 20 nt, Human
uaagaaagccuccucugagc

SEQ ID NO: 1388046 - RNA, 24 nt, Human
uaagaaagccuccucugagcagaa

SEQ ID NO: 1388047 - RNA, 24 nt, Human
uaagccugggcagggccugguguc

SEQ ID NO: 1388048 - RNA, 24 nt, Human
uaauuuuugcauguuuaguagaga

SEQ ID NO: 1388049 - RNA, 24 nt, Human
uacagcaucagggcucacagugcc

SEQ ID NO: 1388050 - RNA, 25 nt, Human
uaccaggcccaaccgccaugucacc

SEQ ID NO: 1388051 - RNA, 18 nt, Human
uaccuaacugcccaaggg

SEQ ID NO: 1388052 - RNA, 18 nt, Human
uagacaucucaccugugg

SEQ ID NO: 1388053 - RNA, 22 nt, Human
uagagacgggguuucgccaugu

SEQ ID NO: 1388054 - RNA, 23 nt, Human
uagaggcaaagaggcuccaagga

SEQ ID NO: 1388055 - RNA, 21 nt, Human
uagcacugcacagggcagggc

SEQ ID NO: 1388056 - RNA, 24 nt, Human
uaguagagacgggguuucgccaug

SEQ ID NO: 1388057 - RNA, 19 nt, Human
ucacugcaaccuccacugc

SEQ ID NO: 1388058 - RNA, 24 nt, Human
ucacugcaaccuccacugccuggg

SEQ ID NO: 1388059 - RNA, 20 nt, Human
ucagccucccgaagugcugg

SEQ ID NO: 1388060 - RNA, 20 nt, Human
ucagccuccugaguagcugg

SEQ ID NO: 1388061 - RNA, 19 nt, Human
ucaguggugcgaucuuggc

SEQ ID NO: 1388062 - RNA, 20 nt, Human
ucaguggugcgaucuuggcu

SEQ ID NO: 1388063 - RNA, 21 nt, Human
uccacaauucccagcugucaa

SEQ ID NO: 1388064 - RNA, 18 nt, Human
uccacagcaagucucuca

SEQ ID NO: 1388065 - RNA, 21 nt, Human
uccaccccaucaggguccaga

SEQ ID NO: 1388066 - RNA, 23 nt, Human
uccagggcagggaggccacagag

SEQ ID NO: 1388067 - RNA, 24 nt, Human
uccagggcagggaggccacagagg

SEQ ID NO: 1388068 - RNA, 20 nt, Human
uccagggccagacucugccc

SEQ ID NO: 1388069 - RNA, 21 nt, Human
uccauguguccaguggguccc

SEQ ID NO: 1388070 - RNA, 18 nt, Human
uccccaagccccuuugac

SEQ ID NO: 1388071 - RNA, 18 nt, Human
uccccaagccccuuugac

SEQ ID NO: 1388072 - RNA, 19 nt, Human
ucccgaagugcugggguua

SEQ ID NO: 1388073 - RNA, 24 nt, Human
ucccgaagugcugggguuacaggc

SEQ ID NO: 1388074 - RNA, 23 nt, Human
ucccucuugucgcccaggcugga

SEQ ID NO: 1388075 - RNA, 21 nt, Human
uccgcccaccucagccucccg

SEQ ID NO: 1388076 - RNA, 18 nt, Human
uccgggugcucauccauc

SEQ ID NO: 1388077 - RNA, 19 nt, Human
uccucggcacccgcccaga

SEQ ID NO: 1388078 - RNA, 24 nt, Human
uccugaguagcugggauuacaggu

SEQ ID NO: 1388079 - RNA, 23 nt, Human
uccuggguucugggacuugacuu

SEQ ID NO: 1388080 - RNA, 24 nt, Human
uccuggguucugggacuugacuuu

SEQ ID NO: 1388081 - RNA, 24 nt, Human
ucgccauguuggccaggauggucu

SEQ ID NO: 1388082 - RNA, 18 nt, Human
ucgcccaggcuggaguuc

SEQ ID NO: 1388083 - RNA, 24 nt, Human
ucucccucuugucgcccaggcugg

SEQ ID NO: 1388084 - RNA, 25 nt, Human
ucucccucuugucgcccaggcugga

SEQ ID NO: 1388085 - RNA, 23 nt, Human
ucucgaacuccugaccucaggug

SEQ ID NO: 1388086 - RNA, 20 nt, Human
ucucuggaccagucgcugcc

SEQ ID NO: 1388087 - RNA, 21 nt, Human
ucugccccaucaggggcugga

SEQ ID NO: 1388088 - RNA, 18 nt, Human
ucuuccagggccagacuc

SEQ ID NO: 1388089 - RNA, 20 nt, Human
ucuuugggaaggacuugugc

SEQ ID NO: 1388090 - RNA, 20 nt, Human
ugacacaagcagucaaagag

SEQ ID NO: 1388091 - RNA, 22 nt, Human
ugacacaagcagucaaagagag

SEQ ID NO: 1388092 - RNA, 18 nt, Human
ugacacgggcagcucugu

SEQ ID NO: 1388093 - RNA, 21 nt, Human
ugacacgggcagcucugucuc

SEQ ID NO: 1388094 - RNA, 21 nt, Human
ugaccaaaucucucacugacc

SEQ ID NO: 1388095 - RNA, 22 nt, Human
ugaccaggccccccugacccaa

SEQ ID NO: 1388096 - RNA, 20 nt, Human
ugacccuagacaucucaccu

SEQ ID NO: 1388097 - RNA, 19 nt, Human
ugacccucagugaccacau

SEQ ID NO: 1388098 - RNA, 21 nt, Human
ugaccgcaccugaagucugag

SEQ ID NO: 1388099 - RNA, 18 nt, Human
ugaccucaggugauccgc

SEQ ID NO: 1388100 - RNA, 21 nt, Human
ugaccucaggugauccgccca

SEQ ID NO: 1388101 - RNA, 24 nt, Human
ugaccucaggugauccgcccaccu

SEQ ID NO: 1388102 - RNA, 20 nt, Human
ugacucuagacaucucaccu

SEQ ID NO: 1388103 - RNA, 19 nt, Human
ugaggcugggaagaggcag

SEQ ID NO: 1388104 - RNA, 21 nt, Human
ugaggcugggaagaggcagca

SEQ ID NO: 1388105 - RNA, 21 nt, Human
ugauccaacugugccucucac

SEQ ID NO: 1388106 - RNA, 23 nt, Human
ugaugagaccuccuccugugggg

SEQ ID NO: 1388107 - RNA, 27 nt, Human
ugauucccugucccuggaccagucucc

SEQ ID NO: 1388108 - RNA, 23 nt, Human
ugcccaagggcagaaggcucuuc

SEQ ID NO: 1388109 - RNA, 18 nt, Human
ugcccugguccccucugu

SEQ ID NO: 1388110 - RNA, 21 nt, Human
ugcccugguccccucuguggu

SEQ ID NO: 1388111 - RNA, 24 nt, Human
ugccucagccuccugaguagcugg

SEQ ID NO: 1388112 - RNA, 24 nt, Human
ugcgacgcagcugggcgugugcca

SEQ ID NO: 1388113 - RNA, 19 nt, Human
ugcugaggguaaagggccc

SEQ ID NO: 1388114 - RNA, 20 nt, Human
ugcuggguccugggcuuugg

SEQ ID NO: 1388115 - RNA, 18 nt, Human
ugcuguggggaugaagga

SEQ ID NO: 1388116 - RNA, 20 nt, Human
ugcuucgagacagcuucuuu

SEQ ID NO: 1388117 - RNA, 24 nt, Human
ugcuucgagacagcuucuuuuccu

SEQ ID NO: 1388118 - RNA, 22 nt, Human
uggaauccagggcagggaggcc

SEQ ID NO: 1388119 - RNA, 23 nt, Human
uggaguugcuguggggaugaagg

SEQ ID NO: 1388120 - RNA, 24 nt, Human
uggccaggauggucucgaacuccu

SEQ ID NO: 1388121 - RNA, 23 nt, Human
uggccaggccucugcuagccagg

SEQ ID NO: 1388122 - RNA, 20 nt, Human
uggcccagggucacaucugg

SEQ ID NO: 1388123 - RNA, 20 nt, Human
uggcgagugcugagggaugc

SEQ ID NO: 1388124 - RNA, 24 nt, Human
uggcucuuccagggccagacucug

SEQ ID NO: 1388125 - RNA, 20 nt, Human
ugggaauacuugggacaaag

SEQ ID NO: 1388126 - RNA, 21 nt, Human
ugggauuacaggugcccgcca

SEQ ID NO: 1388127 - RNA, 22 nt, Human
ugggauuacaggugcccgccac

SEQ ID NO: 1388128 - RNA, 23 nt, Human
ugggauuacaggugcccgccacc

SEQ ID NO: 1388129 - RNA, 23 nt, Human
ugggauuacaggugcccgccacc

SEQ ID NO: 1388130 - RNA, 24 nt, Human
ugggauuacaggugcccgccaccg

SEQ ID NO: 1388131 - RNA, 21 nt, Human
ugggcgugugccaccugggcu

SEQ ID NO: 1388132 - RNA, 24 nt, Human
ugggcuccuuccaugccacguucu

SEQ ID NO: 1388133 - RNA, 21 nt, Human
ugggcuguuccaggcaccugg

SEQ ID NO: 1388134 - RNA, 18 nt, Human
ugggguuacaggccugag

SEQ ID NO: 1388135 - RNA, 19 nt, Human
ugggguuacaggccugagc

SEQ ID NO: 1388136 - RNA, 22 nt, Human
ugggguuacaggccugagcuac

SEQ ID NO: 1388137 - RNA, 21 nt, Human
uggugucggggucccaguggg

SEQ ID NO: 1388138 - RNA, 21 nt, Human
ugucauaagccugggcagggc

SEQ ID NO: 1388139 - RNA, 20 nt, Human
ugucggggucccagugggcu

SEQ ID NO: 1388140 - RNA, 24 nt, Human
uguuuaguagagacgggguuucgc

SEQ ID NO: 1388141 - RNA, 19 nt, Human
uuacaggccugagcuacca

SEQ ID NO: 1388142 - RNA, 18 nt, Human
uuaguagagacgggguuu

SEQ ID NO: 1388143 - RNA, 22 nt, Human
uuaguagagacgggguuucgcc

SEQ ID NO: 1388144 - RNA, 24 nt, Human
uuaguagagacgggguuucgccau

SEQ ID NO: 1388145 - RNA, 25 nt, Human
uucaccccacucccagacaagggac

SEQ ID NO: 1388146 - RNA, 21 nt, Human
uucccaggucccaaagcagca

SEQ ID NO: 1388147 - RNA, 23 nt, Human
uuccuggaucaccaaggaaaaaa

SEQ ID NO: 1388148 - RNA, 18 nt, Human
uugcuguggggaugaagg

SEQ ID NO: 1388149 - RNA, 19 nt, Human
uugggacaaagggaagaca

SEQ ID NO: 1388150 - RNA, 22 nt, Human
uugggacaaagggaagacaaga

SEQ ID NO: 1388151 - RNA, 21 nt, Human
uuuaguagagacgggguuucg

SEQ ID NO: 1388152 - RNA, 19 nt, Human
uuucgccauguuggccagg

SEQ ID NO: 1388153 - RNA, 20 nt, Human
uuuuccuuuugagaugaagu

SEQ ID NO: 1388154 - RNA, 20 nt, Human
uuuuugcauguuuaguagag

SEQ ID NO: 1388155 - RNA, 19 nt, Human
aauuucuuccuuguuucuc

SEQ ID NO: 1388156 - RNA, 21 nt, Human
acccucauacugaacucuggc

SEQ ID NO: 1388157 - RNA, 25 nt, Human
aggauaaugggguaacgggggucaa

SEQ ID NO: 1388158 - RNA, 22 nt, Human
aucauauuccacaucaaacauc

SEQ ID NO: 1388159 - RNA, 23 nt, Human
caucuucauucugaguaucgggg

SEQ ID NO: 1388160 - RNA, 25 nt, Human
cauuucuccuuuaagaucaucaaaa

SEQ ID NO: 1388161 - RNA, 19 nt, Human
cccucauacugaacucugg

SEQ ID NO: 1388162 - RNA, 25 nt, Human
cccucauacugaacucuggcuucau

SEQ ID NO: 1388163 - RNA, 22 nt, Human
ccucauacugaacucuggcuuc

SEQ ID NO: 1388164 - RNA, 18 nt, Human
guauccaacauuucccuc

SEQ ID NO: 1388165 - RNA, 25 nt, Human
uauuccacaucaaacaucuccuuca

SEQ ID NO: 1388166 - RNA, 19 nt, Human
uccaaaugcuuuuucuugg

SEQ ID NO: 1388167 - RNA, 22 nt, Human
uccaaaugcuuuuucuuggcac

SEQ ID NO: 1388168 - RNA, 20 nt, Human
uccaagucuucaaagucacc

SEQ ID NO: 1388169 - RNA, 22 nt, Human
uccaagucuucaaagucaccgu

SEQ ID NO: 1388170 - RNA, 19 nt, Human
ucccaggucgaaaacccuc

SEQ ID NO: 1388171 - RNA, 19 nt, Human
ucccucgcuguugcccaag

SEQ ID NO: 1388172 - RNA, 22 nt, Human
ucugaguaucggggcccgauuu

SEQ ID NO: 1388173 - RNA, 21 nt, Human
uucacagggaacauuuucaau

SEQ ID NO: 1388174 - RNA, 21 nt, Human
uucagcugugcuuguuucugc

SEQ ID NO: 1388175 - RNA, 21 nt, Human
uuccaagucuucaaagucacc

SEQ ID NO: 1388176 - RNA, 23 nt, Human
uuccaagucuucaaagucaccgu

SEQ ID NO: 1388177 - RNA, 24 nt, Human
uuucccucgcuguugcccaagcca

SEQ ID NO: 1388178 - RNA, 22 nt, Human
aagauuauuuguuagcagccuu

SEQ ID NO: 1388179 - RNA, 25 nt, Human
aagcuuucuuuucuggagaacaacu

SEQ ID NO: 1388180 - RNA, 26 nt, Human
acacagacccagggaggggggaacgc

SEQ ID NO: 1388181 - RNA, 26 nt, Human
aguuuuuuuuuucucuaauaucauuu

SEQ ID NO: 1388182 - RNA, 20 nt, Human
aucuuccucaggacccaaua

SEQ ID NO: 1388183 - RNA, 18 nt, Human
auguagccaaaauaguaa

SEQ ID NO: 1388184 - RNA, 19 nt, Human
caaagacugaagcacauca

SEQ ID NO: 1388185 - RNA, 22 nt, Human
cagcacacagacccagggaggg

SEQ ID NO: 1388186 - RNA, 22 nt, Human
caggagcucagaagcggucaug

SEQ ID NO: 1388187 - RNA, 21 nt, Human
ccaguggccucacagcugaca

SEQ ID NO: 1388188 - RNA, 20 nt, Human
ccucacagcugacagggccu

SEQ ID NO: 1388189 - RNA, 18 nt, Human
cggcagcaggagcucaga

SEQ ID NO: 1388190 - RNA, 20 nt, Human
cuuugacucagcaccagugg

SEQ ID NO: 1388191 - RNA, 20 nt, Human
gcaccaguggccucacagcu

SEQ ID NO: 1388192 - RNA, 20 nt, Human
gcucugagcacagggaugag

SEQ ID NO: 1388193 - RNA, 19 nt, Human
gcuugaacugggcaacagc

SEQ ID NO: 1388194 - RNA, 25 nt, Human
uagccaaaauaguaaucuuccucag

SEQ ID NO: 1388195 - RNA, 20 nt, Human
uccaagcuuucuuuucugga

SEQ ID NO: 1388196 - RNA, 18 nt, Human
ucccuuugacucagcacc

SEQ ID NO: 1388197 - RNA, 22 nt, Human
ucuaauaucauuuaaccaaaaa

SEQ ID NO: 1388198 - RNA, 21 nt, Human
ugacagggccuaaaugcggca

SEQ ID NO: 1388199 - RNA, 24 nt, Human
ugacucagcaccaguggccucaca

SEQ ID NO: 1388200 - RNA, 21 nt, Human
ugcauuuauuauacaaagacu

SEQ ID NO: 1388201 - RNA, 20 nt, Human
ugcuuuauucuucgcuguca

SEQ ID NO: 1388202 - RNA, 20 nt, Human
uggaauaacagcacacagac

SEQ ID NO: 1388203 - RNA, 26 nt, Human
ugucuuauucuccagaugcagguuua

SEQ ID NO: 1388204 - RNA, 24 nt, Human
uucccuuugacucagcaccagugg

SEQ ID NO: 1388205 - RNA, 19 nt, Human
uuuuuuuuuuuauaggggc

SEQ ID NO: 1388206 - RNA, 21 nt, Human
aaaagaaaugcagaucugauc

SEQ ID NO: 1388207 - RNA, 23 nt, Human
aaaagaaaugcagaucugaucca

SEQ ID NO: 1388208 - RNA, 21 nt, Human
aaccccauuggcccuguccuc

SEQ ID NO: 1388209 - RNA, 19 nt, Human
aacucauucucugccuccu

SEQ ID NO: 1388210 - RNA, 20 nt, Human
aaggagaggcugcagcagca

SEQ ID NO: 1388211 - RNA, 19 nt, Human
aaucaagggccugguagac

SEQ ID NO: 1388212 - RNA, 21 nt, Human
acauaaaaggguuuuuagggg

SEQ ID NO: 1388213 - RNA, 19 nt, Human
accagcggcccagggaggc

SEQ ID NO: 1388214 - RNA, 21 nt, Human
acucauucucugccuccuggg

SEQ ID NO: 1388215 - RNA, 19 nt, Human
agacacacggcuccucagu

SEQ ID NO: 1388216 - RNA, 23 nt, Human
agagguucaccuugcugaggugc

SEQ ID NO: 1388217 - RNA, 23 nt, Human
agcccaggcacuguccugggccu

SEQ ID NO: 1388218 - RNA, 22 nt, Human
agcuggcaaccccauuggcccu

SEQ ID NO: 1388219 - RNA, 24 nt, Human
agcugugggccagggcgacuucca

SEQ ID NO: 1388220 - RNA, 19 nt, Human
aggaacucauucucugccu

SEQ ID NO: 1388221 - RNA, 21 nt, Human
aggcaaggcaugcacuuggaa

SEQ ID NO: 1388222 - RNA, 24 nt, Human
aggcagcccucuucucugcgcagg

SEQ ID NO: 1388223 - RNA, 24 nt, Human
aggugggcagggccagccccaggg

SEQ ID NO: 1388224 - RNA, 20 nt, Human
aggugggcgaagcgcgccuc

SEQ ID NO: 1388225 - RNA, 18 nt, Human
caagccucggguccuccc

SEQ ID NO: 1388226 - RNA, 19 nt, Human
cacuccauugccaucuacc

SEQ ID NO: 1388227 - RNA, 19 nt, Human
cacuguggaccccgagcgg

SEQ ID NO: 1388228 - RNA, 18 nt, Human
cagcagcaaaagcgaaca

SEQ ID NO: 1388229 - RNA, 19 nt, Human
cagcagcaaaagcgaacag

SEQ ID NO: 1388230 - RNA, 22 nt, Human
cagcagcaaaagcgaacagaag

SEQ ID NO: 1388231 - RNA, 20 nt, Human
cagcccucuucucugcgcag

SEQ ID NO: 1388232 - RNA, 25 nt, Human
caggccccaaggaugaggaccagga

SEQ ID NO: 1388233 - RNA, 19 nt, Human
cagggccagccccagggcc

SEQ ID NO: 1388234 - RNA, 19 nt, Human
cagggcccugcagagacag

SEQ ID NO: 1388235 - RNA, 21 nt, Human
cauggcggcuuuccgcagugu

SEQ ID NO: 1388236 - RNA, 19 nt, Human
ccaaggaugaggaccagga

SEQ ID NO: 1388237 - RNA, 20 nt, Human
ccacuccauugccaucuacc

SEQ ID NO: 1388238 - RNA, 18 nt, Human
ccagagaugaaaucaagg

SEQ ID NO: 1388239 - RNA, 19 nt, Human
ccagccccagggcccuggg

SEQ ID NO: 1388240 - RNA, 22 nt, Human
ccaggacuuccacccaagacug

SEQ ID NO: 1388241 - RNA, 19 nt, Human
ccaggcagcugugggccag

SEQ ID NO: 1388242 - RNA, 22 nt, Human
ccauugccaucuaccugcucaa

SEQ ID NO: 1388243 - RNA, 18 nt, Human
cccagacgagcuggagaa

SEQ ID NO: 1388244 - RNA, 21 nt, Human
cccagggcccugggcuucgaa

SEQ ID NO: 1388245 - RNA, 19 nt, Human
cccagguagaggacaggag

SEQ ID NO: 1388246 - RNA, 21 nt, Human
ccccauuggcccuguccuccu

SEQ ID NO: 1388247 - RNA, 22 nt, Human
cccgccucuuuccagagaugaa

SEQ ID NO: 1388248 - RNA, 19 nt, Human
cccugccucggugcucccc

SEQ ID NO: 1388249 - RNA, 19 nt, Human
ccgaagagagcugcuuggc

SEQ ID NO: 1388250 - RNA, 24 nt, Human
ccgccucuuuccagagaugaaauc

SEQ ID NO: 1388251 - RNA, 18 nt, Human
ccggagcuggcaacccca

SEQ ID NO: 1388252 - RNA, 24 nt, Human
ccucccugggacccugggaggcca

SEQ ID NO: 1388253 - RNA, 22 nt, Human
ccugggacccugggaggccagg

SEQ ID NO: 1388254 - RNA, 20 nt, Human
cgcaggggcagcccaggcac

SEQ ID NO: 1388255 - RNA, 23 nt, Human
cgccugugcuuguuuccaggagc

SEQ ID NO: 1388256 - RNA, 18 nt, Human
cggcagcuggaagcagag

SEQ ID NO: 1388257 - RNA, 21 nt, Human
cggcccagggaggccaggcag

SEQ ID NO: 1388258 - RNA, 23 nt, Human
cggcuccucaguacacauuccuu

SEQ ID NO: 1388259 - RNA, 18 nt, Human
cgggagggaacgggcggc

SEQ ID NO: 1388260 - RNA, 19 nt, Human
cgggagggaacgggcggca

SEQ ID NO: 1388261 - RNA, 27 nt, Human
cguguacuacaaugcaggccccaagga

SEQ ID NO: 1388262 - RNA, 20 nt, Human
cuacggccggagcagaucgg

SEQ ID NO: 1388263 - RNA, 21 nt, Human
cucacugcccugacaucugcc

SEQ ID NO: 1388264 - RNA, 21 nt, Human
cucagcucaagccucgggucc

SEQ ID NO: 1388265 - RNA, 19 nt, Human
cucauucucugccuccugg

SEQ ID NO: 1388266 - RNA, 23 nt, Human
cucccugggacccugggaggcca

SEQ ID NO: 1388267 - RNA, 19 nt, Human
cuccuccagauacucgccc

SEQ ID NO: 1388268 - RNA, 18 nt, Human
cugaccggcuccaccaaa

SEQ ID NO: 1388269 - RNA, 24 nt, Human
cugcagcagcaaaagcgaacagaa

SEQ ID NO: 1388270 - RNA, 24 nt, Human
cuggagaagcuggugcagguggug

SEQ ID NO: 1388271 - RNA, 21 nt, Human
cuggcccugagggcugagaag

SEQ ID NO: 1388272 - RNA, 22 nt, Human
cugggccuucccuucuggcucc

SEQ ID NO: 1388273 - RNA, 18 nt, Human
cugggcgucugaucauuc

SEQ ID NO: 1388274 - RNA, 19 nt, Human
gaaauggguuuauugcaaa

SEQ ID NO: 1388275 - RNA, 19 nt, Human
gaacucauucucugccucc

SEQ ID NO: 1388276 - RNA, 21 nt, Human
gacaggagugacagguguggu

SEQ ID NO: 1388277 - RNA, 20 nt, Human
gacaggcuggugaucccagg

SEQ ID NO: 1388278 - RNA, 19 nt, Human
gacaggugugguugcccag

SEQ ID NO: 1388279 - RNA, 19 nt, Human
gagaaggagaggcugcagg

SEQ ID NO: 1388280 - RNA, 20 nt, Human
gagcagacacacggcuccuc

SEQ ID NO: 1388281 - RNA, 23 nt, Human
gcagcagcaaaagcgaacagaag

SEQ ID NO: 1388282 - RNA, 19 nt, Human
gcagcugugggccagggcg

SEQ ID NO: 1388283 - RNA, 25 nt, Human
gccagccccagggcccugggcuucg

SEQ ID NO: 1388284 - RNA, 20 nt, Human
gccccagggcccugggcuuc

SEQ ID NO: 1388285 - RNA, 22 nt, Human
gcccugacaucugcccagacga

SEQ ID NO: 1388286 - RNA, 21 nt, Human
gcccugggcuucgaacccggc

SEQ ID NO: 1388287 - RNA, 18 nt, Human
gcccuguccuccugcacc

SEQ ID NO: 1388288 - RNA, 18 nt, Human
gcuccugacgccugugcu

SEQ ID NO: 1388289 - RNA, 20 nt, Human
gcuggacucgguggggccug

SEQ ID NO: 1388290 - RNA, 24 nt, Human
gcuggaucacagaggccgggcucg

SEQ ID NO: 1388291 - RNA, 22 nt, Human
gcuggcccugagggcugagaag

SEQ ID NO: 1388292 - RNA, 18 nt, Human
gcuggugaucccagguag

SEQ ID NO: 1388293 - RNA, 22 nt, Human
ggacucgguggggccuggcugg

SEQ ID NO: 1388294 - RNA, 19 nt, Human
ggagcagacacacggcucc

SEQ ID NO: 1388295 - RNA, 19 nt, Human
ggcaggagggggaugauga

SEQ ID NO: 1388296 - RNA, 19 nt, Human
ggcagggccagccccaggg

SEQ ID NO: 1388297 - RNA, 22 nt, Human
ggcccugggcuucgaacccggc

SEQ ID NO: 1388298 - RNA, 19 nt, Human
ggccuucccuucuggcucc

SEQ ID NO: 1388299 - RNA, 19 nt, Human
ggcugagaaggagaggcuc

SEQ ID NO: 1388300 - RNA, 20 nt, Human
gggaacgggcggcaaaggga

SEQ ID NO: 1388301 - RNA, 23 nt, Human
gggaagaugagauggcaacacug

SEQ ID NO: 1388302 - RNA, 26 nt, Human
gggcaggagggggaugaugaggacuc

SEQ ID NO: 1388303 - RNA, 18 nt, Human
gggcuggacucggugggg

SEQ ID NO: 1388304 - RNA, 23 nt, Human
ggggaccccggagcuggcaaccc

SEQ ID NO: 1388305 - RNA, 21 nt, Human
ggggcagcccaggcacugucc

SEQ ID NO: 1388306 - RNA, 21 nt, Human
ggggccagugggugcugaugu

SEQ ID NO: 1388307 - RNA, 23 nt, Human
ggggccuggcuggcccugagggc

SEQ ID NO: 1388308 - RNA, 23 nt, Human
gggggaugaugaggacucacacu

SEQ ID NO: 1388309 - RNA, 27 nt, Human
gguggggccuggcuggcccugagggcu

SEQ ID NO: 1388310 - RNA, 19 nt, Human
guccugggccuucccuucu

SEQ ID NO: 1388311 - RNA, 19 nt, Human
guccuucagauggguggcu

SEQ ID NO: 1388312 - RNA, 19 nt, Human
gucgcaggggcagcccagg

SEQ ID NO: 1388313 - RNA, 22 nt, Human
gucuugagccacugcagucugg

SEQ ID NO: 1388314 - RNA, 18 nt, Human
gugcggcggcacauggcg

SEQ ID NO: 1388315 - RNA, 20 nt, Human
guggauguuugguggaggug

SEQ ID NO: 1388316 - RNA, 21 nt, Human
gugggccagggcgacuuccac

SEQ ID NO: 1388317 - RNA, 19 nt, Human
uaagccugaacgugggcug

SEQ ID NO: 1388318 - RNA, 18 nt, Human
uagagguauuccaccuuc

SEQ ID NO: 1388319 - RNA, 23 nt, Human
ucaaaagaaaugcagaucugauc

SEQ ID NO: 1388320 - RNA, 22 nt, Human
ucaguacacauucccccacccc

SEQ ID NO: 1388321 - RNA, 24 nt, Human
uccaccaaacagguugcccaggcu

SEQ ID NO: 1388322 - RNA, 23 nt, Human
uccaccugcuggaucacagaggc

SEQ ID NO: 1388323 - RNA, 18 nt, Human
uccaugcugcugcugacc

SEQ ID NO: 1388324 - RNA, 22 nt, Human
uccaugcugcugcugacucgga

SEQ ID NO: 1388325 - RNA, 23 nt, Human
uccauugccaucuaccugcucaa

SEQ ID NO: 1388326 - RNA, 23 nt, Human
ucccugggacccugggaggccag

SEQ ID NO: 1388327 - RNA, 23 nt, Human
uccgcaguguccugucuugagcc

SEQ ID NO: 1388328 - RNA, 21 nt, Human
uccuccagauacucgcccagc

SEQ ID NO: 1388329 - RNA, 21 nt, Human
uccuccauguccgggagggaa

SEQ ID NO: 1388330 - RNA, 20 nt, Human
uccuucagauggguggcugg

SEQ ID NO: 1388331 - RNA, 20 nt, Human
ucgcggaugggcugcaagag

SEQ ID NO: 1388332 - RNA, 21 nt, Human
ucgcggaugggcugcaagagg

SEQ ID NO: 1388333 - RNA, 21 nt, Human
ucugaccggcuccaccaaaca

SEQ ID NO: 1388334 - RNA, 18 nt, Human
ucuguaccagcggcccag

SEQ ID NO: 1388335 - RNA, 19 nt, Human
ucuguaccagcggcccagg

SEQ ID NO: 1388336 - RNA, 22 nt, Human
ucugugugugugugugaucugu

SEQ ID NO: 1388337 - RNA, 26 nt, Human
ucuugagccacugcagucugggcccc

SEQ ID NO: 1388338 - RNA, 20 nt, Human
ugaagccauggcccgcuacg

SEQ ID NO: 1388339 - RNA, 24 nt, Human
ugacaggcuggugaucccagguag

SEQ ID NO: 1388340 - RNA, 18 nt, Human
ugacucggagccccacag

SEQ ID NO: 1388341 - RNA, 19 nt, Human
ugcaggugcagggcagggu

SEQ ID NO: 1388342 - RNA, 18 nt, Human
ugcccagacgagcuggag

SEQ ID NO: 1388343 - RNA, 19 nt, Human
ugcccagacgagcuggaga

SEQ ID NO: 1388344 - RNA, 18 nt, Human
ugccuccugggggacccc

SEQ ID NO: 1388345 - RNA, 18 nt, Human
ugcugauguacuuuggcu

SEQ ID NO: 1388346 - RNA, 18 nt, Human
ugcugcugcugacucgga

SEQ ID NO: 1388347 - RNA, 18 nt, Human
ugcuuguuuccaggagca

SEQ ID NO: 1388348 - RNA, 20 nt, Human
ugggccagggcgacuuccac

SEQ ID NO: 1388349 - RNA, 18 nt, Human
ugggccuucccuucuggc

SEQ ID NO: 1388350 - RNA, 20 nt, Human
ugggcuggguccuucagaug

SEQ ID NO: 1388351 - RNA, 19 nt, Human
ugguggagguggaguucug

SEQ ID NO: 1388352 - RNA, 19 nt, Human
ugguuugccuccagugcag

SEQ ID NO: 1388353 - RNA, 24 nt, Human
uguggauguuugguggagguggag

SEQ ID NO: 1388354 - RNA, 22 nt, Human
uguggucuugccuucgucaaaa

SEQ ID NO: 1388355 - RNA, 18 nt, Human
ugugugugugugugaucu

SEQ ID NO: 1388356 - RNA, 21 nt, Human
ugugugugugugugaucugua

SEQ ID NO: 1388357 - RNA, 19 nt, Human
uguuugguggagguggagu

SEQ ID NO: 1388358 - RNA, 18 nt, Human
uuaguccgggagucaggg

SEQ ID NO: 1388359 - RNA, 19 nt, Human
uucacggauuacuacggcc

SEQ ID NO: 1388360 - RNA, 18 nt, Human
uucuuggugaggucgcgg

SEQ ID NO: 1388361 - RNA, 21 nt, Human
uucuuggugaggucgcggaug

SEQ ID NO: 1388362 - RNA, 18 nt, Human
uugaagccauggcccgcu

SEQ ID NO: 1388363 - RNA, 20 nt, Human
uugaagccauggcccgcuac

SEQ ID NO: 1388364 - RNA, 18 nt, Human
uuugucaaggcagggccc

SEQ ID NO: 1388365 - RNA, 23 nt, Human
aaaggagacaagcccucuaagaa

SEQ ID NO: 1388366 - RNA, 23 nt, Human
aaaugaagagauacaaaagccca

SEQ ID NO: 1388367 - RNA, 19 nt, Human
aagaagcugguccagccga

SEQ ID NO: 1388368 - RNA, 21 nt, Human
aaugaagagauacaaaagccc

SEQ ID NO: 1388369 - RNA, 21 nt, Human
acccgagaagaaauggggagu

SEQ ID NO: 1388370 - RNA, 19 nt, Human
acuuuaagacccgagaaga

SEQ ID NO: 1388371 - RNA, 23 nt, Human
agaaacuguccauucagucuguc

SEQ ID NO: 1388372 - RNA, 24 nt, Human
agaaaggagacaagcccucuaaga

SEQ ID NO: 1388373 - RNA, 25 nt, Human
agaaaggagacaagcccucuaagaa

SEQ ID NO: 1388374 - RNA, 18 nt, Human
agaccagcacaaagucag

SEQ ID NO: 1388375 - RNA, 23 nt, Human
agagcaucauggucccugaccaa

SEQ ID NO: 1388376 - RNA, 23 nt, Human
agaggacaaggguagaaaggaga

SEQ ID NO: 1388377 - RNA, 21 nt, Human
agcuacagaaaauauuacauu

SEQ ID NO: 1388378 - RNA, 18 nt, Human
aggacaaggguagaaagg

SEQ ID NO: 1388379 - RNA, 18 nt, Human
cacuagguguaacaaggu

SEQ ID NO: 1388380 - RNA, 21 nt, Human
cagcaaaugucucuauggcuu

SEQ ID NO: 1388381 - RNA, 24 nt, Human
cagcagcagaagacgaagacucaa

SEQ ID NO: 1388382 - RNA, 21 nt, Human
cagccgagcagcagcagaaga

SEQ ID NO: 1388383 - RNA, 20 nt, Human
caguccugggccccaggcuc

SEQ ID NO: 1388384 - RNA, 21 nt, Human
ccagaccagcacaaagucagg

SEQ ID NO: 1388385 - RNA, 19 nt, Human
cccucuaagaaacugucca

SEQ ID NO: 1388386 - RNA, 20 nt, Human
ccucuugcucuccucaccaa

SEQ ID NO: 1388387 - RNA, 20 nt, Human
cucaaauguccauguagagc

SEQ ID NO: 1388388 - RNA, 24 nt, Human
cugucugcagucaauaugaagagg

SEQ ID NO: 1388389 - RNA, 21 nt, Human
cuuccgaagccgcugcagucc

SEQ ID NO: 1388390 - RNA, 23 nt, Human
gguccagccgagcagcagcagaa

SEQ ID NO: 1388391 - RNA, 22 nt, Human
uaaaugaagagauacaaaagcc

SEQ ID NO: 1388392 - RNA, 22 nt, Human
uccacacccaaggaacugaagc

SEQ ID NO: 1388393 - RNA, 20 nt, Human
uccucuugcucuccucacca

SEQ ID NO: 1388394 - RNA, 25 nt, Human
ucuagagcauccacuagguguaaca

SEQ ID NO: 1388395 - RNA, 24 nt, Human
ucucuauggcuucgggaugaaaau

SEQ ID NO: 1388396 - RNA, 21 nt, Human
ucucuccacuaaaauuuaaaa

SEQ ID NO: 1388397 - RNA, 22 nt, Human
ucuuguguuucugucauagagg

SEQ ID NO: 1388398 - RNA, 21 nt, Human
ugaagagauagccuuuggagc

SEQ ID NO: 1388399 - RNA, 19 nt, Human
ugguccagccgagcagcag

SEQ ID NO: 1388400 - RNA, 22 nt, Human
uuaauuauuuuccaucucucca

SEQ ID NO: 1388401 - RNA, 21 nt, Human
uuccgaagccgcugcaguccu

SEQ ID NO: 1388402 - RNA, 21 nt, Human
uuuaauuauuuuccaucucuc
